(19) United States
(12) Patent Application Publication
(10) Pub. No.: US 2025/0327045 A1
(43) Pub. Date: Oct. 23, 2025

(54) PRIME EDITOR VARIANTS, CONSTRUCTS, AND METHODS FOR ENHANCING PRIME EDITING EFFICIENCY AND PRECISION

(71) Applicants: THE BROAD INSTITUTE, INC., Cambridge, MA (US); PRESIDENT AND FELLOWS OF HARVARD COLLEGE, Cambridge, MA (US); THE TRUSTEES OF PRINCETON UNIVERSITY, Princeton, NJ (US); THE REGENTS OF THE UNIVERSITY OF CALIFORNIA, Oakland, CA (US)

(72) Inventors: David R. Liu, Cambridge, MA (US); Peter J. Chen, Cambridge, MA (US); Brittany Adamson, Princeton, NJ (US); Jeffrey Hussmann, Oakland, CA (US)

(73) Assignees: THE BROAD INSTITUTE, INC., Cambridge, MA (US); PRESIDENT AND FELLOWS OF HARVARD COLLEGE, Cambridge, MA (US); THE TRUSTEES OF PRINCETON UNIVERSITY, Princeton, NJ (US); THE REGENTS OF THE UNIVERSITY OF CALIFORNIA, Oakland, CA (US)

(21) Appl. No.: 18/271,656

(22) PCT Filed: Jan. 11, 2022
(86) PCT No.: PCT/US2022/012054

§ 371 Date: Jul. 10, 2023

Related U.S. Application Data
(60) Provisional application No. 63/136,194, filed on Jan. 11, 2021.
(60) Provisional application No. 63/176,180, filed on Apr. 16, 2021.
(60) Provisional application No. 63/176,202, filed on Apr. 16, 2021.
(60) Provisional application No. 63/194,865, filed on May 28, 2021.
(60) Provisional application No. 63/194,913, filed on May 28, 2021.
(60) Provisional application No. 63/255,897, filed on Oct. 14, 2021.

(51) Int. Cl. C12N 9/12; C12N 9/22; C12N 15/11

(52) U.S. Cl. CPC C12N 9/1276; C12N 9/226; C12N 15/111; C07K 2319/80; C12N 2310/20; C12Y 207/07049

(57) ABSTRACT

The present disclosure provides compositions and methods for prime editing with improved editing efficiency and/or reduced indel formation by inhibiting the DNA mismatch repair path way while conducting prime editing of a target site. Accordingly, the present disclosure provides a method for editing a nucleic acid molecule by prime editing that involves contacting a nucleic acid molecule with a prime editor, a pegRNA, and an inhibitor of the DNA mismatch repair pathway, thereby installing one or more modifications to the nucleic acid molecule at a target site with increased editing efficiency and/or lower indel formation. The present disclosure further provides polynucleotides for editing a DNA target site by prime editing comprising a nucleic acid sequence encoding a napDNAbp, a polymerase, and an inhibitor of the DNA mismatch repair pathway, wherein the napDNAbp and polymerase is capable in the presence of a pegRNA of installing one or more modifications in the DNA target site with increased editing efficiency and/or lower indel formation. The disclosure further provides, vectors, cells, and kits comprising the compositions and polynucleotides of the disclosure. The present disclosure also provides compositions and methods for prime editing with improved editing efficiency and/or reduced indel formation with modified prime editor fusion proteins. The disclosure further provides, vectors, cells, and kits comprising the compositions and polynucleotides of the disclosure.

### RELATED APPLICATIONS

[0001] This application is a national stage filing under 35 U.S.C. § 371 of International PCT Application PCT/US2022/012054, filed Jan. 11, 2022, which claims priority under 35 U.S.C. § 119(e) to U.S. Provisional Application, U.S. Ser. No. 63/255,897, filed on Oct. 14, 2021, to U.S. Provisional Application, U.S. Ser. No. 63/231,230, filed on Aug. 9, 2021, to U.S. Provisional Application, U.S. Ser. No. 63/194,913, filed on May 28, 2021, to U.S. Provisional Application, U.S. Ser. No. 63/194,865, filed on May 28, 2021, to U.S. Provisional Application, U.S. Ser. No. 63/176,202, filed on Apr. 16, 2021, to U.S. Provisional Application, U.S. Ser. No. 63/136,194, filed on Jan. 11, 2021, and to U.S. Provisional Application, U.S. Ser. No. 63/176,180, filed on Apr. 16, 2021, each of which is incorporated herein by reference.

### GOVERNMENT SUPPORT

[0002] This invention was made with government support under Grant Nos. AI142756, AI150551, HG009490, EB022376, EB031172, GM118062. CA072720, and GM138167 awarded by the National Institutes of Health, and Grant No. HR0011-17-2-0049 awarded by the Department of Defense. The government has certain rights in the invention.

### REFERENCE TO A SEQUENCE LISTING SUBMITTED AS A TEXT FILE VIA EFS-WEB

[0003] The instant application contains a Sequence Listing which has been submitted in ASCII format via EFS-Web and is hereby incorporated by reference in its entirety. Said ASCII copy, created on Jul. 8, 2023, is named B119570114US05-SEQ-TNG and is 2,594,186 bytes in size.

### INCORPORATION BY REFERENCE

[0004] In addition, this application refers to and incorporates by reference the entire contents of each of the following patent applications directed to prime editing previously filed by one or more of the present inventors: U.S. Provisional Application Ser. No. 62/820,813, filed Mar. 19, 2019; U.S. Provisional Application Ser. No. 62/858,958, filed Jun. 7, 2019; U.S. Provisional Application Ser. No. 62/889,996, filed Aug. 21, 2019; U.S. Provisional Application U.S. Ser. No. 62/922,654, filed Aug. 21, 2019; U.S. Provisional Application Ser. No. 62/913,553, filed Oct. 10, 2019; U.S. Provisional Application Ser. No. 62/973,558, filed Oct. 10, 2019; U.S. Provisional Application Ser. No. 62/931,195, filed Nov. 5, 2019; U.S. Provisional Application Ser. No. 62/944,231, filed Dec. 5, 2019: U.S. Provisional Application Ser. No. 62/974,537, filed Dec. 5, 2019; U.S. Provisional Application Ser. No. 62/991,069, filed Mar. 17, 2020; U.S. Provisional Application Ser. No. 63/100,548, filed Mar. 17, 2020; International PCT Application No. PCT/US2020/023721, filed Mar. 19, 2020; International PCT Application No. PCT/US2020/023553, filed Mar. 19, 2020; International PCT Application No. PCT/US2020/023583, filed Mar. 19, 2020; International PCT Application No. PCT/US2020/023730, filed Mar. 19, 2020; International PCT Application No. PCT/US2020/023713, filed Mar. 19, 2020; International PCT Application No. PCT/US2020/023712, filed Mar. 19, 2020; International PCT Application No. PCT/US2020/023727, filed Mar. 19, 2020; International PCT Application No. PCT/US2020/023724, filed Mar. 19, 2020; International PCT Application No. PCT/US2020/023725, filed Mar. 19, 2020; International PCT Application No. PCT/US2020/023728, filed Mar. 19, 2020; International PCT Application No. PCT/US2020/023732, filed Mar. 19, 2020; and International PCT Application No. PCT/US2020/023723, filed Mar. 19, 2020.

### BACKGROUND OF THE INVENTION

[0005] The recent development of prime editing enables the insertion, deletion, and/or replacement of genomic DNA sequences without requiring error-prone double-strand DNA breaks. See Anzalone et al., “Search-and-replace genome editing without double-strand breaks or donor DNA,” Nature, 2019, Vol. 576, pp. 149-157, the contents of which are incorporated herein by reference. Prime editing uses an engineered Cas9 nickase-reverse transcriptase fusion protein (e.g., PE1 or PE2) paired with an engineered prime editing guide RNA (pegRNA) that not only directs Cas9 to a target genomic site, but also which encodes the information for installing the desired edit. Without wishing to be bound by any particular theory, prime editing proceeds through a presumed multi-step editing process: 1) the Cas9 domain binds and nicks the target genomic DNA site, which is specified by the pegRNA's spacer sequence; 2) the reverse transcriptase domain uses the nicked genomic DNA as a primer to initiate the synthesis of an edited DNA strand using an engineered extension on the pegRNA as a template for reverse transcription—this generates a single-stranded 3′ flap containing the edited DNA sequence; 3) cellular DNA repair resolves the 3′ flap intermediate by the displacement of a 5′ flap species that occurs via invasion by the edited 3′ flap, excision of the 5′ flap containing the original DNA sequence, and ligation of the new 3′ flap to incorporate the edited DNA strand, forming a heteroduplex of one edited and one unedited strand; and 4) cellular DNA repair replaces the unedited strand within the heteroduplex using the edited strand as a template for repair, completing the editing process.

[0006] Since 2019, prime editing has been applied to introduce genetic changes in a wide variety of cells and/or organisms. Given its rapid adoption, prime editing represents a powerful tool for genomic editing. Despite its versatility and wide-scale use, prime editing efficiency can vary widely across different edit classes, target loci, and cell types (Anzalone et al., 2019). Thus, modifications to prime editing systems which result in increasing the specificity and/or efficiency of the prime editing process would significantly help advance the art. In particular, modifications that facilitate more efficient incorporation of the edited DNA strand synthesized by the prime editor into the target genomic site are desirable. It is also desirable to reduce the frequency of indel byproducts that can form as a result of prime editing. Such further modifications to prime editing would advance the art.

### SUMMARY OF THE INVENTION

[0007] In one aspect, the present disclosure relates to the observation that the efficiency and/or specificity of prime editing is impacted by a cell's own DNA mismatch repair (MMR) DNA repair pathway. MMR is a multi-factor pathway that is involved in correcting basepair mismatches and insertion/deletion mispairs generated during DNA replication and recombination. As described herein, the inventors developed a novel genetic screening method—referred to in one embodiment as “pooled CRISPRi screen for prime editing outcomes”—which led to the identification of various genetic determinates, including MMR, as affecting the efficiency and/or specificity of prime editing. Accordingly, in one aspect, the present disclosure provides novel prime editing systems comprising a means for inhibiting and/or evade the effects of MMR, thereby increasing the efficiency and/or specificity of prime editing. In one embodiment, the disclosure provides a prime editing system that comprises an MMR-inhibiting protein, such as, but not limited to, a dominant negative variant of an MMR protein, such as a dominant negative MLH1 protein (i.e., “MLH1dn”). In another embodiment, the prime editing system comprises the installation of one or more silent mutations nearby an intended edit, thereby allowing the intended edit from evading MMR recognition, even in the absence of an MMR-inhibiting protein, such as an MLH1dn. In another aspect, the disclosure provides a novel genetic screen for identifying genetic determinants, such as MMR, that impact the efficiency and/or specificity of prime editing. In still further aspects, the disclosure provides nucleic acid constructs encoding the improved prime editing systems described herein. The disclosure in other aspects also provides vectors (e.g., AAV or lentivirus vectors) comprising nucleic acids encoding the improved prime editing system described herein. In still other aspects, the disclosure provides cells comprising the improved prime editing systems described herein. The disclosure also provides in other aspects the components of the genetic screens, including nucleic acid and/or vector constructs, guide RNA, pegRNAs, cells (e.g., CRISPRi cells), and other reagents and/or materials for conducting the herein disclosed genetic screens. In still other aspects, the disclosure provides compositions and kits, e.g., pharmaceutical compositions, comprising the improved prime editing system described herein and which are capable of being administered to a cell, tissue, or organism by any suitable means, such as by gene therapy, mRNA delivery, virus-like particle delivery, or ribonucleoprotein (RNP) delivery. In yet another aspect, the present disclosure provides methods of using the improved prime editing system to install one or more edits in a target nucleic acid molecule, e.g., a genomic locus. In still another aspect, the present disclosure provides methods of treating a disease or disorder using the improved prime editing system to correct or otherwise repair one or more genetic changes (e.g., a single nucleotide polymorphism) in a target nucleic acid molecule, e.g., a genomic locus comprising one or more disease-causing mutations.

[0008] Thus, in various aspects, the present disclosure describes an improved and modified approach to prime editing that comprises inhibiting the DNA mismatch repair (MMR) system during prime editing. The inventors have surprisingly found that the editing efficiency of prime editing may be significantly increased (e.g., at least a 2-fold increase, at least a 3-fold increase, at least a 4-fold increase, at least a 5-fold increase, at least a 6-fold increase, at least a 7-fold increase, at least an 8-fold increase, at least a 9-fold increase, at least a 10-fold increase, or more) when one or more functions of the DNA mismatch repair (MMR) system are inhibited, blocked, or otherwise inactivated during prime editing (such as using the MLH1dn inhibitor of MMR). In addition, the inventors have surprisingly found that the frequency of indel formation resulting from prime editing may be significantly decreased (e.g., about a 2-fold decrease, about a 3-fold decrease, about a 4-fold decrease, about a 5-fold decrease, about a 6-fold decrease, about a 7-fold decrease, about a 8-fold decrease, about a 9-fold decrease, or about a 10-fold decrease or lower) when one or more functions of the DNA mismatch repair (MMR) system are inhibited, blocked, or otherwise inactivated during prime editing.

[0009] The present disclosure also describes in other embodiments an improved and modified approach to prime editing that comprises evading the DNA mismatch repair (MMR) system during prime editing. The inventors have surprisingly found that the editing efficiency of prime editing may be significantly increased (e.g., at least 1.5-fold, at least 2.0-fold, at least 2.5-fold, at least 3.0-fold, at least 3.5-fold, at least 4.0-fold, at least 4.5-fold, at least 5.0-fold, at least 5.5-fold, at least 6.0-fold, at least 6.5-fold, at least 7.0-fold, at least 7.5-fold, at least 8.0-fold, at least 8.5-fold, at least 9.0-fold, at least 9.5-fold, at least 10.0-fold, at least 11-fold, at least 12-fold, at least 13-fold, at least 14-fold, at least 15-fold, at least 16-fold, at least 17-fold, at least 18-fold, at least 19-fold, at least 20-fold, at least 21-fold, at least 22-fold, at least 23-fold, at least 24-fold, at least 25-fold, at least 26-fold, at least 27-fold, at least 28-fold, at least 29-fold, at least 30-fold, at least 31-fold, at least 32-fold, at least 33-fold, at least 34-fold, at least 35-fold, at least 36-fold, at least 37-fold, at least 38-fold, at least 39-fold, at least 40-fold, at least 41-fold, at least 42-fold, at least 43-fold, at least 44-fold, at least 45-fold, at least 46-fold, at least 47-fold, at least 48-fold, at least 49-fold, at least 50-fold, at least 51-fold, at least 52-fold, at least 53-fold, at least 54-fold, at least 55-fold, at least 56-fold, at least 57-fold, at least 58-fold, at least 59-fold, at least 60-fold, at least 61-fold, at least 62-fold, at least 63-fold, at least 64-fold, at least 65-fold, at least 66-fold, at least 67-fold, at least 68-fold, at least 69-fold, at least 70-fold, at least 71-fold, at least 72-fold, at least 73-fold, at least 74-fold, or at least 75-fold increased) when one or more silent mutations are installed nearby a desired site for installing a genetic change by prime editing, in the presence or absence of an inhibitor of MMR. In addition, the inventors have surprisingly found that the frequency of indel formation resulting from prime editing may be significantly decreased (e.g., at least 1.5-fold, at least 2.0-fold, at least 2.5-fold, at least 3.0-fold, at least 3.5-fold, at least 4.0-fold, at least 4.5-fold, at least 5.0-fold, at least 5.5-fold, at least 6.0-fold, at least 6.5-fold, at least 7.0-fold, at least 7.5-fold, at least 8.0-fold, at least 8.5-fold, at least 9.0-fold, at least 9.5-fold, at least 10.0-fold, at least 11-fold, at least 12-fold, at least 13-fold, at least 14-fold, at least 15-fold, at least 16-fold, at least 17-fold, at least 18-fold, at least 19-fold, at least 20-fold, at least 21-fold, at least 22-fold, at least 23-fold, at least 24-fold, at least 25-fold, at least 26-fold, at least 27-fold, at least 28-fold, at least 29-fold, at least 30-fold, at least 31-fold, at least 32-fold, at least 33-fold, at least 34-fold, at least 35-fold, at least 36-fold, at least 37-fold, at least 38-fold, at least 39-fold, at least 40-fold, at least 41-fold, at least 42-fold, at least 43-fold, at least 44-fold, at least 45-fold, at least 46-fold, at least 47-fold, at least 48-fold, at least 49-fold, at least 50-fold, at least 51-fold, at least 52-fold, at least 53-fold, at least 54-fold, at least 55-fold, at least 56-fold, at least 57-fold, at least 58-fold, at least 59-fold, at least 60-fold, at least 61-fold, at least 62-fold, at least 63-fold, at least 64-fold, at least 65-fold, at least 66-fold, at least 67-fold, at least 68-fold, at least 69-fold, at least 70-fold, at least 71-fold, at least 72-fold, at least 73-fold, at least 74-fold, or at least 75-fold decreased) when one or more silent mutations are installed nearby a desired site for installing a genetic change by prime editing, in the presence or absence of an inhibitor of MMR.

[0010] In some embodiments, the disclosure describes an improved prime editing system referred to herein as “PE4,” which includes PE2 plus an MLH1 dominant negative protein (e.g., wild-type MLH1 with amino acids 754-756 truncated as described further herein). In certain embodiments, the MLH1dn is expressed in trans in a cell comprising the PE2 fusion protein. The MLH1dn and the PE2 may be provided together or separate, e.g., by delivery on separate plasmids, separate vectors (e.g., AAV or lentivirus vectors), separate vector-like particles, separate ribonucleoprotein complexes (RNPs), or by delivery on the same plasmids, same vectors (e.g., AAV or lentivirus vectors), same vector-like particles, same ribonucleoprotein complexes (RNPs). In other embodiments, the MLH1dn may be fused to PE2 or otherwise associated with, coupled, or joined to PE2 such that they are co-delivered.

[0011] In other embodiments, the disclosure describes an improved prime editing system referred to as “PE5,” which includes PE3 (which is PE2 plus a second-strand nicking guide RNA) plus an MLH1 dominant negative protein (e.g., wild-type MLH1 with amino acids 754-756 truncated as described further herein). In certain embodiments, the MLH1dn is expressed in trans in a cell comprising the PE3 prime editor. The MLH1dn and the PE3 may be provide together or separate, e.g., by delivery on separate plasmids, separate vectors (e.g., AAV or lentivirus vectors), separate vector-like particles, separate ribonucleoprotein complexes (RNPs), or by delivery on the same plasmid, same vector (e.g., AAV or lentivirus vectors), same vector-like particles, same ribonucleoprotein complexes (RNPs). In other embodiments, the MLH1dn may be fused to PE3 or otherwise associated with, coupled, or joined to PE3 such that they are co-delivered.

[0012] In other aspects, the present disclosure describes an optimized PE2 prime editor architecture referred to herein as “PEmax.” PEmax is a modified form of PE2 which comprises modified reverse transcriptase codon usage. SpCas9 mutations, NLS sequences, and is described in FIG. 54B. Specifically, PEmax refers to a PE complex comprising a fusion protein comprising Cas9 (R221K N394K H840A) and a variant MMLV RT pentamutant (D200N T306K W313F T330P L603W) having the following structure: [bipartite NLS]-[Cas9(R221K)(N394K)(H840A)]-[linker]-[MMLV_RT(D200N)(T330P)(L603W)]-[bipartite NLS]-[NLS]+a desired PEgRNA, wherein the PE fusion has the amino acid sequence of SEQ ID NO: 99, which is shown as follows:

MKRTADGSEFESPKKKRKVDKKYSIGLDIGTNSVGWAVITDEYKVPSKKFKVLGNT
DRHSIKKNLIGALLFDSGETAEATRLKRTARRRYTRRKNRICYLQEIFSNEMAKVD
DSFFHRLEESFLVEEDKKHERHPIFGNIVDEVAYHEKYPTIYHLRKKLVDSTDKADL
RLIYLALAHMIKFRGHFLIEGDLNPDNSDVDKLFIQLVQTYNQLFEENPINASGVDA
KAILSARLSKSRKLENLIAQLPGEKKNGLFGNLIALSLGLTPNFKSNEDLAEDAKLQ
LSKDTYDDDLDNLLAQIGDQYADLFLAAKNLSDAILLSDILRVNTEITKAPLSASMIK
RYDEHHQDLTLLKALVRQQLPEKYKEIFFDQSKNGYAGYIDGGASQEEFYKFIKPI
LEKMDGTEELLVKLKREDLLRKQRTFDNGSIPHQIHLGELHAILRRQEDFYPFLKD
NREKIEKILTFRIPYYVGPLARGNSRFAWMTRKSEETITPWNFEEVVDKGASAQSFI
ERMTNFDKNLPNEKVLPKHSLLYEYFTVYNELTKVKYVTEGMRKPAFLSGEQKKA
IVDLLFKTNRKVTVKQLKEDYFKKIECFDSVEISGVEDRFNASLGTYHDLLKIIKDK
DFLDNEENEDILEDIVLTLTLFEDREMIEERLKTYAHLFDDKVMKQLKRRRYTGW
GRLSRKLINGIRDKQSGKTILDFLKSDGFANRNFMQLIHDDSLTFKEDIQKAQVSGQ
GDSLHEHIANLAGSPAIKKGILQTVKVVDELVKVMGRHKPENIVIEMARENQTTQK
GQKNSRERMKRIEEGIKELGSQILKEHPVENTQLQNEKLYLYYLQNGRDMYVDQE
LDINRLSDYDVDAIVPQSFLKDDSIDNKVLTRSDKNRGKSDNVPSEEVVKKMKNYW
RQLLNAKLITQRKFDNLTKAERGGLSELDKAGFIKRQLVETRQITKHVAQILDSRM
NTKYDENDKLIREVKVITLKSKLVSDFRKDFQFYKVREINNYHHAHDAYLNAVVGT
ALIKKYPKLESEFVYGDYKVYDVRKMIAKSEQEIGKATAKYFFYSNIMNFFKTEITL
ANGEIRKRPLIETNGETGEIVWDKGRDFATVRKVLSMPQVNIVKKTEVQTGGFSKE
SILPKRNSDKLIARKKDWDPKKYGGFDSPTVAYSVLVVAKVEKGKSKKLKSVKEL
LGITIMERSSFEKNPIDFLEAKGYKEVKKDLIIKLPKYSLFELENGRKRMLASAGEL
QKGNELALPSKYVNFLYLASHYEKLKGSPEDNEQKQLFVEQHKHYLDEIIEQISEFS
KRVILADANLDKVLSAYNKHRDKPIREQAENIIHLFTLTNLGAPAAFKYFDTTIDRK
RYTSTKEVLDATLIHQSITGLYETRIDLSQLGGDSGGSSGGSKRTADGSEFESPKKK
RKVSGGSSGGSTLNIEDEYRLHETSKEPDVSLGSTWLSDFPQAWAETGGMGLAVRQAP
LIIPLKATSTPVSIKQYPMSQEARLGIKPHIQRLLDQGILVPCQSPWNTPLLPVKKPGTND
YRPVQDLREVNKRVEDIHPTVPNPYNLLSGLPPSHQWYTVLDLKDAFFCLRLHPTSQPL
FAFEWRDPEMGISGQLTWTRLPQGFKNSPTLFNEALHRDLADFRIQHPDLILLQYVDDLL
LAATSELDCQQGTRALLQTLGNLGYRASAKKAQICQKQVKYLGYLLKEGQRWLTEAR
KETVMGQPTPKTPRQLREFLGKAGFCRLFIPGFAEMAAPLYPLTKPGTLFNWGPDQQKA
YQEIKQALLTAPALGLPDLTKPFELFVDEKQGYAKGVLTQKLGPWRRPVAYLSKKLDP
VAAGWPPCLRMVAAIAVLTKDAGKLTMGQPLVILAPHAVEALVKQPPDRWLSNARMT
HYQALLLDTDRVQFGPVVALNPATLLPLPEEGLQHNCLDILAEAHGTRPDLTDQPLPDA
DHTWYTDGSSLLQEGQRKAGAAVTTETEVIWAKALPAGTSAQRAELIALTQALKMAEG
KKLNVYTDSRYAFATAHIHGEIYRRRGWLTSEGKEIKNKDEILALLKALFLPKRLSIIHCP
GHQKGHSAEARGNRMADQAARKAAITETPDTSTLLIENSSPSGGSKRTADGSEFESPKK
KRKVGSGPAAKRVKLD (SEQ ID NO: 99)

KEY:
BIPARTITE SV40 NUCLEAR LOCALIZATION SEQUENCE (NLS) TOP: (SEQ ID NO: 101), BOTTOM: (SEQ ID NO: 140)
CAS9(R221K N39K H840A) (SEQ ID NO: 104)
SGGSX2-BIPARTITE SV40NLS-SGGSX2 LINKER (SEQ ID NO: 105)
M-MLV reverse transcriptase (D200N T306K W313F T330P L603W) (SEQ ID NO: 98)
Other linker sequence (SEQ ID NO: 122)
Other linker sequence (SEQ ID NO: 106)
c-Myc NLS PAAKRVKLD (SEQ ID NO: 135)

[0013] In some embodiments, the PE4 may be modified to substitute the PE2 fusion protein with PEmax. In such cases, the modified prime editing system may be referred to as “PE4max.”

[0014] In some embodiments, the PE5 may be modified to substitute the PE3 prime editor with PEmax. In such cases, the modified prime editing system may be referred to as “PE5max” and includes a second stranding nicking guide RNA.

[0015] The inventors developed prime editing which enables the insertion, deletion, and/or replacement of genomic DNA sequences without requiring error-prone double-strand DNA breaks. The present disclosure now provides an improved method of prime editing involving the blocking, inhibiting, evading, or inactivation of the MMR pathway (e.g., by inhibiting, blocking, or inactivating an MMR pathway protein, including MLH1) during prime editing, whereby doing so surprisingly results in increased editing efficiency and reduced indel formation. As used herein, “during” prime editing can embrace any suitable sequence of events, such that the prime editing step can be applied before, at the same time, or after the step of blocking, inhibiting, evading, or inactivating the MMR pathway (e.g., by targeting the inhibition of MLH1).

[0016] In various aspects and without wishing to be bound by any particular theory, prime editing uses an engineered Cas9 nickase-reverse transcriptase fusion protein (e.g., PE1 or PE2) paired with an engineered prime editing guide RNA (pegRNA) that both directs Cas9 to the target genomic site and encodes the information for installing the desired edit. Prime editing proceeds through a multi-step editing process: 1) the Cas9 domain binds and nicks the target genomic DNA site, which is specified by the pegRNA's spacer sequence; 2) the reverse transcriptase domain uses the nicked genomic DNA as a primer to initiate the synthesis of an edited DNA strand using an engineered extension on the pegRNA as a template for reverse transcription—this generates a single-stranded 3′ flap containing the edited DNA sequence; 3) cellular DNA repair resolves the 3′ flap intermediate by the displacement of a 5′ flap species that occurs via invasion by the edited 3′ flap, excision of the 5′ flap containing the original DNA sequence, and ligation of the new 3′ flap to incorporate the edited DNA strand, forming a heteroduplex of one edited and one unedited strand; and 4) cellular DNA repair replaces the unedited strand within the heteroduplex using the edited strand as a template for repair, completing the editing process.

[0017] Efficient incorporation of the desired edit requires that the newly synthesized 3′ flap contains a portion of sequence that is homologous to the genomic DNA site. This homology enables the edited 3′ flap to compete with the endogenous DNA strand (the corresponding 5′ flap) for incorporation into the DNA duplex. Because the edited 3′ flap will contain less sequence homology than the endogenous 5′ flap, the competition is expected to favor the 5′ flap strand. Thus, a potential limiting factor in the efficiency of prime editing may be the failure of the 3′ flap, which contains the edit, to effectively invade and displace the 5′ flap strand. Moreover, successful 3′ flap invasion and removal of the 5′ flap only incorporates the edit on one strand of the double-stranded DNA genome. Permanent installation of the edit requires cellular DNA repair to replace the unedited complementary DNA strand using the edited strand as a template. While the cell can be made to favor replacement of the unedited strand over the edited strand (step 4 above) by the introduction of a nick in the unedited strand adjacent to the edit using a secondary sgRNA (i.e., the PE3 system), this process still relies on a second stage of DNA repair.

[0018] This disclosure describes a modified approach to prime editing that comprises additionally inhibiting, blocking, or otherwise inactivating the DNA mismatch repair (MMR) system. In certain embodiments, the DNA mismatch repair (MMR) system can be inhibited, blocked, or otherwise inactivating one or more proteins of the MMR system, including, but not limited to MLH1, PMS2 (or MutL alpha), PMS1 (or MutL beta), MLH3 (or MutL gamma), MutS alpha (MSH2-MSH6), MutS beta (MSH2-MSH3), MSH2, MSH6, PCNA, RFC, EXO1, POLδ, and PCNA. The disclosure contemplates any suitable means by which to inhibit, block, or otherwise inactivate the DNA mismatch repair (MMR) system, including, but not limited to inactivating one or more critical proteins of the MMR system at the genetic level, e.g., by introducing one or more mutations in the genes encoding a protein of the MMR system, e.g., MLH1, PMS2 (or MutL alpha), PMS1 (or MutL beta), MLH3 (or MutL gamma), MutS alpha (MSH2-MSH6), MutS beta (MSH2-MSH3), MSH2, MSH6, PCNA, RFC, EXO1, POLδ, and PCNA.

[0019] Thus, in one aspect, the present disclosure provides a method for editing a nucleotide molecule (e.g., a genome) using prime editing while blocking, inhibiting, evading, or otherwise inactivating the DNA mismatch repair (MMR) system.

[0020] In another aspect, the present disclosure provides a method for editing a nucleotide molecule (e.g., a genome) using prime editing while blocking, inhibiting, evading, or otherwise inactivating a protein of the MMR system, e.g., MLH1, PMS2 (or MutL alpha), PMS1 (or MutL beta), MLH3 (or MutL gamma), MutS alpha (MSH2-MSH6), MutS beta (MSH2-MSH3), MSH2, MSH6, PCNA, RFC, EXO1, POLδ, and PCNA.

[0021] In still another aspect, the present disclosure provides a method for editing a nucleotide molecule (e.g., a genome) using prime editing while blocking, inhibiting, evading, or otherwise inactivating MLH1 or variant thereof.

[0022] In another aspect, the present disclosure provides a method for editing a nucleotide molecule (e.g., a genome) using prime editing while blocking, inhibiting, evading, or otherwise inactivating PMS2 (or MutL alpha) or variant thereof.

[0023] In yet another aspect, the present disclosure provides a method for editing a nucleotide molecule (e.g., a genome) using prime editing while blocking, inhibiting, evading, or otherwise inactivating PMS1 (or MutL beta) or variant thereof.

[0024] In still another aspect, the present disclosure provides a method for editing a nucleotide molecule (e.g., a genome) using prime editing while blocking, inhibiting, evading, or otherwise inactivating MLH3 (or MutL gamma) or variant thereof.

[0025] In another aspect, the present disclosure provides a method for editing a nucleotide molecule (e.g., a genome) using prime editing while blocking, inhibiting, evading, or otherwise inactivating MutS alpha (MSH2-MSH6) or variant thereof.

[0026] In still another aspect, the present disclosure provides a method for editing a nucleotide molecule (e.g., a genome) using prime editing while blocking, inhibiting, evading, or otherwise inactivating MSH2 or variant thereof.

[0027] In another aspect, the present disclosure provides a method for editing a nucleotide molecule (e.g., a genome) using prime editing while blocking, inhibiting, evading, or otherwise inactivating MSH6 or variant thereof.

[0028] In yet another aspect, the present disclosure provides a method for editing a nucleotide molecule (e.g., a genome) using prime editing while blocking, inhibiting, evading, or otherwise inactivating PCNA or variant thereof.

[0029] In still another aspect, the present disclosure provides a method for editing a nucleotide molecule (e.g., a genome) using prime editing while blocking, inhibiting, evading, or otherwise inactivating RFC or variant thereof.

[0030] In another aspect, the present disclosure provides a method for editing a nucleotide molecule (e.g., a genome) using prime editing while blocking, inhibiting, evading, or otherwise inactivating EXO1 or variant thereof.

[0031] In yet another aspect, the present disclosure provides a method for editing a nucleotide molecule (e.g., a genome) using prime editing while blocking, inhibiting, evading, or otherwise inactivating POLδ or variant thereof.

[0032] Thus, in one aspect, the present disclosure provides a method for editing a nucleotide molecule (e.g., a genome) using prime editing while blocking, inhibiting, evading, or otherwise inactivating the DNA mismatch repair (MMR) system.

[0033] In another aspect, the disclosure provides a method for evading MMR by installing one or more silent mutations nearby an intended edit, resulting in the evading of MMR and thereby improving editing efficiency of prime editing. In various embodiments, the number of silent mutations installed can be one, or two, or three, or four, or five, or six, or seven, or eight, or nine, or ten, or eleven, or twelve, or thirteen, or fourteen, or fifteen, or sixteen, or seventeen, or eighteen, or nineteen, or twenty or more. The one more silent mutations may be located upstream or downstream (or a combination if multiple silent mutations are involved) of the intended edit site, on the same or opposite strand of DNA as the intended edit site (or a combination if multiple silent mutations are involved). The silent mutations may be located upstream or downstream of the intended edit by 1, 2, 3, 4, 5, 6, 7, 8, 9, 10, 11, 12, 13, 14, 15, 16, 17, 18, 19, 20, 21, 22, 23, 24, 25 26, 27, 28, 29, 30, 31, 32, 33, 34, 35, 36, 37, 38, 39, 40, or more nucleotide positions away from the intended edit. In various embodiments, the method of evading by silent mutation installation results in a significant increase in editing efficiency of prime editing (e.g., at least 1.5-fold, at least 2.0-fold, at least 2.5-fold, at least 3.0-fold, at least 3.5-fold, at least 4.0-fold, at least 4.5-fold, at least 5.0-fold, at least 5.5-fold, at least 6.0-fold, at least 6.5-fold, at least 7.0-fold, at least 7.5-fold, at least 8.0-fold, at least 8.5-fold, at least 9.0-fold, at least 9.5-fold, at least 10.0-fold, at least 11-fold, at least 12-fold, at least 13-fold, at least 14-fold, at least 15-fold, at least 16-fold, at least 17-fold, at least 18-fold, at least 19-fold, at least 20-fold, at least 21-fold, at least 22-fold, at least 23-fold, at least 24-fold, at least 25-fold, at least 26-fold, at least 27-fold, at least 28-fold, at least 29-fold, at least 30-fold, at least 31-fold, at least 32-fold, at least 33-fold, at least 34-fold, at least 35-fold, at least 36-fold, at least 37-fold, at least 38-fold, at least 39-fold, at least 40-fold, at least 41-fold, at least 42-fold, at least 43-fold, at least 44-fold, at least 45-fold, at least 46-fold, at least 47-fold, at least 48-fold, at least 49-fold, at least 50-fold, at least 51-fold, at least 52-fold, at least 53-fold, at least 54-fold, at least 55-fold, at least 56-fold, at least 57-fold, at least 58-fold, at least 59-fold, at least 60-fold, at least 61-fold, at least 62-fold, at least 63-fold, at least 64-fold, at least 65-fold, at least 66-fold, at least 67-fold, at least 68-fold, at least 69-fold, at least 70-fold, at least 71-fold, at least 72-fold, at least 73-fold, at least 74-fold, or at least 75-fold increased) when one or more silent mutations are installed nearby a desired site for installing a genetic change by prime editing, in the presence or absence of an inhibitor of MMR. In various embodiments, the method of evading MMR by silent mutation installation results in a significant decrease in the frequency of indel formation of prime editing (e.g., at least 1.5-fold, at least 2.0-fold, at least 2.5-fold, at least 3.0-fold, at least 3.5-fold, at least 4.0-fold, at least 4.5-fold, at least 5.0-fold, at least 5.5-fold, at least 6.0-fold, at least 6.5-fold, at least 7.0-fold, at least 7.5-fold, at least 8.0-fold, at least 8.5-fold, at least 9.0-fold, at least 9.5-fold, at least 10.0-fold, at least 11-fold, at least 12-fold, at least 13-fold, at least 14-fold, at least 15-fold, at least 16-fold, at least 17-fold, at least 18-fold, at least 19-fold, at least 20-fold, at least 21-fold, at least 22-fold, at least 23-fold, at least 24-fold, at least 25-fold, at least 26-fold, at least 27-fold, at least 28-fold, at least 29-fold, at least 30-fold, at least 31-fold, at least 32-fold, at least 33-fold, at least 34-fold, at least 35-fold, at least 36-fold, at least 37-fold, at least 38-fold, at least 39-fold, at least 40-fold, at least 41-fold, at least 42-fold, at least 43-fold, at least 44-fold, at least 45-fold, at least 46-fold, at least 47-fold, at least 48-fold, at least 49-fold, at least 50-fold, at least 51-fold, at least 52-fold, at least 53-fold, at least 54-fold, at least 55-fold, at least 56-fold, at least 57-fold, at least 58-fold, at least 59-fold, at least 60-fold, at least 61-fold, at least 62-fold, at least 63-fold, at least 64-fold, at least 65-fold, at least 66-fold, at least 67-fold, at least 68-fold, at least 69-fold, at least 70-fold, at least 71-fold, at least 72-fold, at least 73-fold, at least 74-fold, or at least 75-fold decrease) when one or more silent mutations are installed nearby a desired site for installing a genetic change by prime editing, in the presence or absence of an inhibitor of MMR.

[0034] In another aspect, the present disclosure provides a method for editing a nucleotide molecule (e.g., a genome), comprising contacting a target nucleotide molecule with a prime editor and an inhibitor of the MMR system, e.g., an inhibitor of one or more of MLH1, PMS2 (or MutL alpha). PMS1 (or MutL beta), MLH3 (or MutL gamma), MutS alpha (MSH2-MSH6), MutS beta (MSH2-MSH3), MSH2, MSH6, PCNA, RFC, EXO1, POLδ, or PCNA. In various embodiments, the inhibitor can be a small molecule inhibitor. In other embodiments, the inhibitor can be an antibody, e.g., a neutralizing antibody. In still other embodiments, the inhibitor can be a variant of an MMR protein (e.g., a variant encoded by a dominant negative mutant of the gene encoding the MMR protein that adversely affects the function or expression of the normal wild type MMR protein, also referred to herein as a “dominant negative mutant,” “dominant negative variant,” or a “dominant negative protein,” e.g., a “dominant negative MMR protein”). In some embodiments, the inhibitor is a dominant negative variant of an MMR protein that inhibits the activity of a wild type MMR protein. For example, the inhibitor can be an MLH1 protein variant (e.g., a dominant negative mutant) of one or more of MLH1, PMS2 (or MutL alpha), PMS1 (or MutL beta), MLH3 (or MutL gamma), MutS alpha (MSH2-MSH6), MutS beta (MSH2-MSH3), MSH2, MSH6, PCNA, RFC, EXO1, POLδ, or PCNA, e.g., a dominant negative mutant of MLH1. In still other embodiments, the inhibitor can be targeted at the level of transcription, e.g., an siRNA or other nucleic acid agent that knocks down the level of a transcript encoding MLH1, PMS2 (or MutL alpha), PMS1 (or MutL beta), MLH3 (or MutL gamma), MutS alpha (MSH2-MSH6), MutS beta (MSH2-MSH3), MSH2, MSH6, PCNA, RFC, EXO1, POLδ, or PCNA. In yet other embodiments, the step of “contacting a target nucleotide molecule with a prime editor” can include (i) delivering directly to a cell an effective amount of a prime editor fusion protein (e.g., PE1 or PE2) complexed with a lipid delivery system; (ii) delivery to a cell an mRNA or delivery complex comprising an mRNA that encodes a prime editor fusion protein and/or a suitable pegRNA; and (iii) a DNA vector (e.g., an AAV or lentivirus vector, plasmid, or other nucleic acid delivery vector) that encodes a prime editor fusion protein and/or a suitable pegRNA on one or more DNA vectors.

[0035] In still another aspect, the present disclosure provides a method for editing a nucleotide molecule (e.g., a genome) using prime editing while blocking, inhibiting, or otherwise inactivating MLH1 or variant thereof. In another aspect, the present disclosure provides a method for editing a nucleotide molecule (e.g., a genome), comprising contacting a target nucleotide molecule with a prime editor and an inhibitor of MLH1. In various embodiments, the inhibitor can be a small molecule inhibitor. In other embodiments, the inhibitor can be an anti-MLH1 antibody, e.g., a neutralizing antibody that inactivates MLH1. In still other embodiments, the inhibitor can be a dominant negative mutant of MLH1. In still other embodiments, the inhibitor can be targeted at the level of transcription of MLH1, e.g., an siRNA or other nucleic acid agent that knocks down the level of a transcript encoding MLH1. In yet other embodiments, the step of “contacting a target nucleotide molecule with a prime editor” can include (i) delivering directly to a cell an effective amount of a prime editor fusion protein (e.g., PE1 or PE2) complexed with a lipid delivery system; (ii) delivery to a cell an mRNA or delivery complex comprising an mRNA that encodes a prime editor fusion protein and/or a suitable pegRNA; and (iii) a DNA vector (e.g., an AAV or lentivirus vector, plasmid, or other nucleic acid delivery vector) that encodes a prime editor fusion protein and/or a suitable pegRNA on one or more DNA vectors.

[0036] In still another aspect, the present disclosure provides a method for editing a nucleotide molecule (e.g., a genome) using prime editing while blocking, inhibiting, or otherwise inactivating PMS2 (or MutL alpha) or variant thereof. In another aspect, the present disclosure provides a method for editing a nucleotide molecule (e.g., a genome), comprising contacting a target nucleotide molecule with a prime editor and an inhibitor of PMS2 (or MutL alpha). In various embodiments, the inhibitor can be a small molecule inhibitor. In other embodiments, the inhibitor can be an anti-PMS2 (or MutL alpha) antibody, e.g., a neutralizing antibody that inactivates PMS2 (or MutL alpha). In still other embodiments, the inhibitor can be a dominant negative mutant of PMS2 (or MutL alpha). In still other embodiments, the inhibitor can be targeted at the level of transcription of PMS2 (or MutL alpha), e.g., an siRNA or other nucleic acid agent that knocks down the level of a transcript encoding ML PMS2 (or MutL alpha). In yet other embodiments, the step of “contacting a target nucleotide molecule with a prime editor” can include (i) delivering directly to a cell an effective amount of a prime editor fusion protein (e.g., PE1 or PE2) complexed with a lipid delivery system; (ii) delivery to a cell a mRNA or delivery complex comprising an mRNA that encodes a prime editor fusion protein and/or a suitable pegRNA; and (iii) a DNA vector (e.g., an AAV or lentivirus vector, plasmid, or other nucleic acid delivery vector) that encodes a prime editor fusion protein and/or a suitable pegRNA on one or more DNA vectors.

[0037] In still another aspect, the present disclosure provides a method for editing a nucleotide molecule (e.g., a genome) using prime editing while blocking, inhibiting, or otherwise inactivating PMS1 (or MutL beta) or variant thereof. In another aspect, the present disclosure provides a method for editing a nucleotide molecule (e.g., a genome), comprising contacting a target nucleotide molecule with a prime editor and an inhibitor of PMS1 (or MutL beta). In various embodiments, the inhibitor can be a small molecule inhibitor. In other embodiments, the inhibitor can be an anti-PMS1 (or MutL beta) antibody, e.g., a neutralizing antibody that inactivates PMS1 (or MutL beta). In still other embodiments, the inhibitor can be a dominant negative mutant of PMS1 (or MutL beta). In still other embodiments, the inhibitor can be targeted at the level of transcription of PMS1 (or MutL beta), e.g., an siRNA or other nucleic acid agent that knocks down the level of a transcript encoding PMS1 (or MutL beta). In yet other embodiments, the step of “contacting a target nucleotide molecule with a prime editor” can include (i) delivering directly to a cell an effective amount of a prime editor fusion protein (e.g., PE1 or PE2) complexed with a lipid delivery system; (ii) delivery to a cell a mRNA or delivery complex comprising an mRNA that encodes a prime editor fusion protein and/or a suitable pegRNA; and (iii) a DNA vector (e.g., an AAV or lentivirus vector, plasmid, or other nucleic acid delivery vector) that encodes a prime editor fusion protein and/or a suitable pegRNA on one or more DNA vectors.

[0038] In still another aspect, the present disclosure provides a method for editing a nucleotide molecule (e.g., a genome) using prime editing while blocking, inhibiting, or otherwise inactivating MLH3 (or MutL gamma) or variant thereof. In another aspect, the present disclosure provides a method for editing a nucleotide molecule (e.g., a genome), comprising contacting a target nucleotide molecule with a prime editor and an inhibitor of MLH3 (or MutL gamma). In various embodiments, the inhibitor can be a small molecule inhibitor. In other embodiments, the inhibitor can be an anti-MLH3 (or MutL gamma) antibody, e.g., a neutralizing antibody that inactivates MLH3 (or MutL gamma). In still other embodiments, the inhibitor can be a dominant negative mutant of MLH3 (or MutL gamma). In still other embodiments, the inhibitor can be targeted at the level of transcription of P MLH3 (or MutL gamma). e.g., an siRNA or other nucleic acid agent that knocks down the level of a transcript encoding MLH3 (or MutL gamma). In yet other embodiments, the step of “contacting a target nucleotide molecule with a prime editor” can include (i) delivering directly to a cell an effective amount of a prime editor fusion protein (e.g., PE1 or PE2) complexed with a lipid delivery system; (ii) delivery to a cell a mRNA or delivery complex comprising an mRNA that encodes a prime editor fusion protein and/or a suitable pegRNA; and (iii) a DNA vector (e.g., an AAV or lentivirus vector, plasmid, or other nucleic acid delivery vector) that encodes a prime editor fusion protein and/or a suitable pegRNA on one or more DNA vectors.

[0039] In still another aspect, the present disclosure provides a method for editing a nucleotide molecule (e.g., a genome) using prime editing while blocking, inhibiting, or otherwise inactivating MutS alpha (MSH2-MSH6) or variant thereof. In another aspect, the present disclosure provides a method for editing a nucleotide molecule (e.g., a genome), comprising contacting a target nucleotide molecule with a prime editor and an inhibitor of MutS alpha (MSH2-MSH6). In various embodiments, the inhibitor can be a small molecule inhibitor. In other embodiments, the inhibitor can be an anti-MutS alpha (MSH2-MSH6) antibody, e.g., a neutralizing antibody that inactivates MutS alpha (MSH2-MSH6). In still other embodiments, the inhibitor can be a dominant negative mutant of MutS alpha (MSH2-MSH6). In still other embodiments, the inhibitor can be targeted at the level of transcription of MutS alpha (MSH2-MSH6), e.g., an siRNA or other nucleic acid agent that knocks down the level of a transcript encoding MutS alpha (MSH2-MSH6). In yet other embodiments, the step of “contacting a target nucleotide molecule with a prime editor” can include (i) delivering directly to a cell an effective amount of a prime editor fusion protein (e.g., PE1 or PE2) complexed with a lipid delivery system; (ii) delivery to a cell a mRNA or delivery complex comprising an mRNA that encodes a prime editor fusion protein and/or a suitable pegRNA; and (iii) a DNA vector (e.g., an AAV or lentivirus vector, plasmid, or other nucleic acid delivery vector) that encodes a prime editor fusion protein and/or a suitable pegRNA on one or more DNA vectors.

[0040] In still another aspect, the present disclosure provides a method for editing a nucleotide molecule (e.g., a genome) using prime editing while blocking, inhibiting, or otherwise inactivating MSH2 or variant thereof. In another aspect, the present disclosure provides a method for editing a nucleotide molecule (e.g., a genome), comprising contacting a target nucleotide molecule with a prime editor and an inhibitor of MSH2. In various embodiments, the inhibitor can be a small molecule inhibitor. In other embodiments, the inhibitor can be an anti-MSH2 antibody, e.g., a neutralizing antibody that inactivates MSH2. In still other embodiments, the inhibitor can be a dominant negative mutant of MSH2. In still other embodiments, the inhibitor can be targeted at the level of transcription of MSH2, e.g., an siRNA or other nucleic acid agent that knocks down the level of a transcript encoding MSH2. In yet other embodiments, the step of “contacting a target nucleotide molecule with a prime editor” can include (i) delivering directly to a cell an effective amount of a prime editor fusion protein (e.g., PE1 or PE2) complexed with a lipid delivery system; (ii) delivery to a cell a mRNA or delivery complex comprising an mRNA that encodes a prime editor fusion protein and/or a suitable pegRNA; and (iii) a DNA vector (e.g., an AAV or lentivirus vector, plasmid, or other nucleic acid delivery vector) that encodes a prime editor fusion protein and/or a suitable pegRNA on one or more DNA vectors.

[0041] In still another aspect, the present disclosure provides a method for editing a nucleotide molecule (e.g., a genome) using prime editing while blocking, inhibiting, or otherwise inactivating MSH6 or variant thereof. In another aspect, the present disclosure provides a method for editing a nucleotide molecule (e.g., a genome), comprising contacting a target nucleotide molecule with a prime editor and an inhibitor of MSH6. In various embodiments, the inhibitor can be a small molecule inhibitor. In other embodiments, the inhibitor can be an anti-MSH6 antibody, e.g., a neutralizing antibody that inactivates MSH6. In still other embodiments, the inhibitor can be a dominant negative mutant of MSH6. In still other embodiments, the inhibitor can be targeted at the level of transcription of MSH6, e.g., an siRNA or other nucleic acid agent that knocks down the level of a transcript encoding MSH6. In yet other embodiments, the step of “contacting a target nucleotide molecule with a prime editor” can include (i) delivering directly to a cell an effective amount of a prime editor fusion protein (e.g., PE1 or PE2) complexed with a lipid delivery system; (ii) delivery to a cell a mRNA or delivery complex comprising an mRNA that encodes a prime editor fusion protein and/or a suitable pegRNA; and (iii) a DNA vector (e.g., an AAV or lentivirus vector, plasmid, or other nucleic acid delivery vector) that encodes a prime editor fusion protein and/or a suitable pegRNA on one or more DNA vectors.

[0042] In still another aspect, the present disclosure provides a method for editing a nucleotide molecule (e.g., a genome) using prime editing while blocking, inhibiting, or otherwise inactivating PCNA or variant thereof. In another aspect, the present disclosure provides a method for editing a nucleotide molecule (e.g., a genome), comprising contacting a target nucleotide molecule with a prime editor and an inhibitor of PCNA. In various embodiments, the inhibitor can be a small molecule inhibitor. In other embodiments, the inhibitor can be an anti-PCNA antibody, e.g., a neutralizing antibody that inactivates PCNA. In still other embodiments, the inhibitor can be a dominant negative mutant of PCNA. In still other embodiments, the inhibitor can be targeted at the level of transcription of PCNA, e.g., an siRNA or other nucleic acid agent that knocks down the level of a transcript encoding PCNA. In yet other embodiments, the step of “contacting a target nucleotide molecule with a prime editor” can include (i) delivering directly to a cell an effective amount of a prime editor fusion protein (e.g., PE1 or PE2) complexed with a lipid delivery system; (ii) delivery to a cell a mRNA or delivery complex comprising an mRNA that encodes a prime editor fusion protein and/or a suitable pegRNA; and (iii) a DNA vector (e.g., an AAV or lentivirus vector, plasmid, or other nucleic acid delivery vector) that encodes a prime editor fusion protein and/or a suitable pegRNA on one or more DNA vectors.

[0043] In still another aspect, the present disclosure provides a method for editing a nucleotide molecule (e.g., a genome) using prime editing while blocking, inhibiting, or otherwise inactivating RFC or variant thereof. In another aspect, the present disclosure provides a method for editing a nucleotide molecule (e.g., a genome), comprising contacting a target nucleotide molecule with a prime editor and an inhibitor of RFC. In various embodiments, the inhibitor can be a small molecule inhibitor. In other embodiments, the inhibitor can be an anti-RFC antibody, e.g., a neutralizing antibody that inactivates RFC. In still other embodiments, the inhibitor can be a dominant negative mutant of RFC. In still other embodiments, the inhibitor can be targeted at the level of transcription of RFC, e.g., an siRNA or other nucleic acid agent that knocks down the level of a transcript encoding RFC. In yet other embodiments, the step of “contacting a target nucleotide molecule with a prime editor” can include (i) delivering directly to a cell an effective amount of a prime editor fusion protein (e.g., PE1 or PE2) complexed with a lipid delivery system; (ii) delivery to a cell a mRNA or delivery complex comprising an mRNA that encodes a prime editor fusion protein and/or a suitable pegRNA; and (iii) a DNA vector (e.g., an AAV or lentivirus vector, plasmid, or other nucleic acid delivery vector) that encodes a prime editor fusion protein and/or a suitable pegRNA on one or more DNA vectors.

[0044] In still another aspect, the present disclosure provides a method for editing a nucleotide molecule (e.g., a genome) using prime editing while blocking, inhibiting, or otherwise inactivating EXO1 or variant thereof. In another aspect, the present disclosure provides a method for editing a nucleotide molecule (e.g., a genome), comprising contacting a target nucleotide molecule with a prime editor and an inhibitor of EXO1. In various embodiments, the inhibitor can be a small molecule inhibitor. In other embodiments, the inhibitor can be an anti-EXO1 antibody, e.g., a neutralizing antibody that inactivates EXO1. In still other embodiments, the inhibitor can be a dominant negative mutant of EXO1. In still other embodiments, the inhibitor can be targeted at the level of transcription of EXO1, e.g., an siRNA or other nucleic acid agent that knocks down the level of a transcript encoding EXO1. In yet other embodiments, the step of “contacting a target nucleotide molecule with a prime editor” can include (i) delivering directly to a cell an effective amount of a prime editor fusion protein (e.g., PE1 or PE2) complexed with a lipid delivery system; (ii) delivery to a cell a mRNA or delivery complex comprising an mRNA that encodes a prime editor fusion protein and/or a suitable pegRNA; and (iii) a DNA vector (e.g., an AAV or lentivirus vector, plasmid, or other nucleic acid delivery vector) that encodes a prime editor fusion protein and/or a suitable pegRNA on one or more DNA vectors.

[0045] In still another aspect, the present disclosure provides a method for editing a nucleotide molecule (e.g., a genome) using prime editing while blocking, inhibiting, or otherwise inactivating POLδ or variant thereof. In another aspect, the present disclosure provides a method for editing a nucleotide molecule (e.g., a genome), comprising contacting a target nucleotide molecule with a prime editor and an inhibitor of POLδ. In various embodiments, the inhibitor can be a small molecule inhibitor. In other embodiments, the inhibitor can be an anti-POLδ antibody, e.g., a neutralizing antibody that inactivates POLδ. In still other embodiments, the inhibitor can be a dominant negative mutant of POLδ. In still other embodiments, the inhibitor can be targeted at the level of transcription of POLδ, e.g., an siRNA or other nucleic acid agent that knocks down the level of a transcript encoding POLδ. In yet other embodiments, the step of “contacting a target nucleotide molecule with a prime editor” can include (i) delivering directly to a cell an effective amount of a prime editor fusion protein (e.g., PE1 or PE2) complexed with a lipid delivery system; (ii) delivery to a cell a mRNA or delivery complex comprising an mRNA that encodes a prime editor fusion protein and/or a suitable pegRNA; and (iii) a DNA vector (e.g., an AAV or lentivirus vector, plasmid, or other nucleic acid delivery vector) that encodes a prime editor fusion protein and/or a suitable pegRNA on one or more DNA vectors.

[0046] In one aspect, the present disclosure provides methods for editing a nucleic acid molecule by prime editing. In some embodiments, the method comprises contacting a nucleic acid molecule with a prime editor, a pegRNA, and an inhibitor of the DNA mismatch repair pathway, thereby installing one or more modifications to the nucleic acid molecule at a target site.

[0047] The method may increase the efficiency of prime editing and/or decrease the frequency of indel formation. In some embodiments, the prime editing efficiency is increased by at least 1.5-fold, at least 2.0-fold, at least 2.5-fold, at least 3.0-fold, at least 3.5-fold, at least 4.0-fold, at least 4.5-fold, at least 5.0-fold, at least 5.5-fold, at least 6.0-fold, at least 6.5-fold, at least 7.0-fold, at least 7.5-fold, at least 8.0-fold, at least 8.5-fold, at least 9.0-fold, at least 9.5-fold, or at least 10.0-fold in the presence of the inhibitor of the DNA mismatch repair pathway. In some embodiments, the frequency of indel formation is decreased by at least 1.5-fold, at least 2.0-fold, at least 2.5-fold, at least 3.0-fold, at least 3.5-fold, at least 4.0-fold, at least 4.5-fold, at least 5.0-fold, at least 5.5-fold, at least 6.0-fold, at least 6.5-fold, at least 7.0-fold, at least 7.5-fold, at least 8.0-fold, at least 8.5-fold, at least 9.0-fold, at least 9.5-fold, or at least 10.0-fold in the presence of the inhibitor of the DNA mismatch repair pathway.

[0048] In some embodiments, the inhibitor of the DNA mismatch repair pathway inhibits one or more proteins of the DNA mismatch repair pathway. In some embodiments, the one or more proteins is selected from the group consisting of MLH1, PMS2 (or MutL alpha), PMS1 (or MutL beta), MLH3 (or MutL gamma), MutS alpha (MSH2-MSH6), MutS beta (MSH2-MSH3), MSH2, MSH6, PCNA, RFC, EXO1, POLδ, and PCNA. In certain embodiments, the one or more proteins is MLH1. In some embodiments, MLH1 comprises an amino acid sequence of SEQ ID NO: 204, or an amino acid sequence having at least 70%, at least 75%, at least 80%, at least 85%, at least 90%, at least 95%, at least 96%, at least 97%, at least 98%, at least 99%, or up to and including 100% sequence identity with SEQ ID NO: 204.

[0049] The inhibitor utilized in the method may be an antibody, a small molecule, a small interfering RNA (siRNA), a small non-coding microRNA, or a dominant negative variant of an MMR protein that inhibits the activity of a wild type MMR protein (e.g., a dominant negative variant of MLH1). In certain embodiments, the inhibitor is an antibody that inhibits the activity of one or more proteins of the DNA mismatch repair pathway. In some embodiments, the inhibitor is a small molecule that inhibits the activity of one or more proteins of the DNA mismatch repair pathway. In certain embodiments, the inhibitor is a small interfering RNA (siRNA) or a small non-coding microRNA that inhibits the activity of one or more proteins of the DNA mismatch repair pathway. In some embodiments, the inhibitor is a dominant negative variant of MLH1 that inhibits MLH1.

[0050] In some embodiments, the dominant negative variant is (a) MLH1 E34A (SEQ ID NO: 222), (b) MLH1 Δ756 (SEQ ID NO: 208), (c) MLH1 Δ754-756 (SEQ ID NO: 209), (d) MLH1 E34A Δ754-756 (SEQ ID NO: 210), (e) MLH1 1-335 (SEQ ID NO: 211), (f) MLH1 1-335 E34A (SEQ ID NO: 212), (g) MLH1 1-335 NLS^{SV40} (SEQ ID NO: 213), (h) MLH1 501-756 (SEQ ID NO: 215), (i) MLH1 501-753 (SEQ ID NO: 216), (j) MLH1 461-753 (SEQ ID NO: 218), or (k) NLS^{SV40} MLH1 501-753 (SEQ ID NO: 223), or a polypeptide comprising an amino acid sequence having at least 70%, at least 75%, at least 80%, at least 85%, at least 90%, at least 95%, at least 96%, at least 97%, at least 98%, at least 99%, or up to and including 100% sequence identity with any of SEQ ID NOs: 208-213, 215, 216, 218, 222, or 223.

[0051] The prime editors utilized in the methods of the present disclosure may comprise multiple components. In some embodiments, the prime editor comprises a napDNAbp and a polymerase. In some embodiments, the napDNAbp is a nuclease active Cas9 domain, a nuclease inactive Cas9 domain, or a Cas9 nickase domain or variant thereof. In certain embodiments, the napDNAbp is selected from the group consisting of: Cas9, Cas12e, Cas12d, Cas12a, Cas12b1, Cas13a, Cas12c. Cas12b2. Cas13a, Cas12c, Cas12d, Cas12e, Cas12h, Cas12i, Cas12g, Cas12f (Cas14), Cas12f1, Cas12j (Cas(b), and Argonaute and optionally has a nickase activity. In certain embodiments, the napDNAbp comprises an amino acid sequence of any one of SEQ ID NOs: 2, 4-67, or 99 (PEmax) or an amino acid sequence having at least an 80%, 85%, 90%, 95%, or 99% sequence identity with any one of SEQ ID NOs: 2, 4-67, or 99 (PEmax). In certain embodiments, the napDNAbp comprises an amino acid sequence of SEQ ID NO: 2 or SEQ ID NO: 37 (e.g., the napDNAbp of PE1 and PE2) or an amino acid sequence having at least an 80%, 85%, 90%, 95%, or 99% sequence identity with SEQ ID NO: 2. In some embodiments, the polymerase is a DNA-dependent DNA polymerase or an RNA-dependent DNA polymerase. In some embodiments, the polymerase is a reverse transcriptase. In certain embodiments, the reverse transcriptase comprises an amino acid sequence of any one of SEQ ID NOs: 69-98 or an amino acid sequence having at least an 80%, 85%, 90%, 95%, or 99% sequence identity with any one of SEQ ID NOs: 69-98.

[0052] The napDNAbp and the polymerase of the prime editor may be joined together to form a fusion protein. In some embodiments, the napDNAbp and the polymerase of the prime editor are joined by a linker to form a fusion protein. In certain embodiments, the linker comprises an amino acid sequence of any one of SEQ ID NOs: 102, or 118-131, or an amino acid sequence having at least an 80%, 85%, 90%, 95%, or 99% sequence identity with any one of SEQ ID NOs: 102, or 118-131. In some embodiments, the linker is 1, 2, 3, 4, 5, 6, 7, 8, 9, 10, 11, 12, 13, 14, 15, 16, 17, 18, 19, 20, 21, 22, 23.24, 25, 26.27, 28, 29, 30, 31.32, 33, 34.35, 36, 38, 38, 39.40, 41, 42, 43, 44, 45, 46, 47, 48, 49, or 50 amino acids in length.

[0053] The components used in the method (e.g., the prime editor, the pegRNA, and/or the inhibitor of the DNA mismatch repair pathway) may be encoded on a DNA vector. In some embodiments, the prime editor, the pegRNA, and the inhibitor of the DNA mismatch repair pathway are encoded on one or more DNA vectors. In certain embodiments, the one or more DNA vectors comprise AAV or lentivirus DNA vectors. In some embodiments, the AAV vector is serotype 1, 2, 3, 4, 5, 6, 7, 8, 9, or 10.

[0054] The prime editors utilized in the presently disclosed methods may also be further joined to additional components. In some embodiments, the prime editor as a fusion protein is further joined by a second linker to the inhibitor of the DNA mismatch repair pathway. In certain embodiments, the second linker is a self-hydrolyzing linker. In certain embodiments, the second linker comprises an amino acid sequence of any one of SEQ ID NOs: 102, 118-131, or 233-236, or an amino acid sequence having at least an 80%, 85%, 90%, 95%, or 99% sequence identity with any one of SEQ ID NOs: 102, 118-131, or 233-236. In some embodiments, the second linker is 1, 2, 3, 4, 5, 6, 7, 8, 9, 10, 11, 12, 13, 14, 15, 16, 17, 18, 19, 20, 21, 22, 23, 24, 25, 26, 27, 28, 29, 30, 31, 32, 33, 34, 35, 36, 37, 38, 39, 40, 41, 42, 43, 44, 45, 46, 47, 48, 49, or 50 amino acids in length.

[0055] In some embodiments, the one or more modifications to the nucleic acid molecule installed at the target site comprise one or more transitions, one or more transversions, one or more insertions, one or more deletions, or one more inversions. In certain embodiments, the one or more transitions are selected from the group consisting of: (a) T to C; (b) A to G; (c) C to T; and (d) G to A. In certain embodiments, the one or more transversions are selected from the group consisting of: (a) T to A; (b) T to G; (c) C to G; (d) C to A; (e) A to T; (f) A to C; (g) G to C; and (h) G to T. In certain embodiments, the one or more modifications comprises changing (1) a G:C basepair to a T:A basepair, (2) a G:C basepair to an A:T basepair, (3) a G:C basepair to a C:G basepair. (4) a T:A basepair to a G:C basepair. (5) a T:A basepair to an A:T basepair, (6) a T:A basepair to a C:G basepair, (7) a C:G basepair to a G:C basepair, (8) a C:G basepair to a T:A basepair, (9) a C:G basepair to an A:T basepair, (10) an A:T basepair to a T:A basepair. (11) an A:T basepair to a G:C basepair, or (12) an A:T basepair to a C:G basepair. In some embodiments, the one or more modifications comprises an insertion or deletion of 1, 2, 3, 4, 5, 6, 7, 8, 9, 10, 11, 12, 13, 14, 15, 16, 17, 18, 19, 20, 21, 22, 23, 24, or 25 nucleotides.

[0056] The methods of the present disclosure may be used for making corrections to one or more disease-associated genes. In some embodiments, the one or more modifications comprises a correction to a disease-associated gene. In certain embodiments, the disease-associated gene is associated with a polygenic disorder selected from the group consisting of: heart disease; high blood pressure; Alzheimer's disease; arthritis; diabetes; cancer; and obesity. In certain embodiments, the disease-associated gene is associated with a monogenic disorder selected from the group consisting of: Adenosine Deaminase (ADA) Deficiency; Alpha-1 Antitrypsin Deficiency; Cystic Fibrosis; Duchenne Muscular Dystrophy; Galactosemia; Hemochromatosis; Huntington's Disease; Maple Syrup Urine Disease; Marfan Syndrome; Neurofibromatosis Type 1; Pachyonychia Congenita; Phenylketonuria; Severe Combined Immunodeficiency; Sickle Cell Disease; Smith-Lemli-Opitz Syndrome; a trinucleotide repeat disorder; a prion disease; and Tay-Sachs Disease.

[0057] In another aspect, the present disclosure provides compositions for editing a nucleic acid molecule by prime editing. In some embodiments, the composition comprises a prime editor, a pegRNA, and an inhibitor of the DNA mismatch repair pathway, wherein the composition is capable of installing one or more modifications to the nucleic acid molecule at a target site.

[0058] The composition may increase the efficiency of prime editing and/or decrease the frequency of indel formation. In some embodiments, the prime editing efficiency is increased by at least 1.5-fold, at least 2.0-fold, at least 2.5-fold, at least 3.0-fold, at least 3.5-fold, at least 4.0-fold, at least 4.5-fold, at least 5.0-fold, at least 5.5-fold, at least 6.0-fold, at least 6.5-fold, at least 7.0-fold, at least 7.5-fold, at least 8.0-fold, at least 8.5-fold, at least 9.0-fold, at least 9.5-fold, or at least 10.0-fold in the presence of the inhibitor of the DNA mismatch repair pathway. In some embodiments, the frequency of indel formation is decreased by at least 1.5-fold, at least 2.0-fold, at least 2.5-fold, at least 3.0-fold, at least 3.5-fold, at least 4.0-fold, at least 4.5-fold, at least 5.0-fold, at least 5.5-fold, at least 6.0-fold, at least 6.5-fold, at least 7.0-fold, at least 7.5-fold, at least 8.0-fold, at least 8.5-fold, at least 9.0-fold, at least 9.5-fold, or at least 10.0-fold in the presence of the inhibitor of the DNA mismatch repair pathway.

[0059] In some embodiments, the inhibitor of the DNA mismatch repair pathway inhibits one or more proteins of the DNA mismatch repair pathway. In some embodiments, the one or more proteins is selected from the group consisting of MLH1, PMS2 (or MutL alpha), PMS1 (or MutL beta), MLH3 (or MutL gamma), MutS alpha (MSH2-MSH6), MutS beta (MSH2-MSH3), MSH2, MSH6, PCNA, RFC, EXO1, POLδ, and PCNA. In certain embodiments, the one or more proteins is MLH1. In some embodiments, MLH1 comprises an amino acid sequence of SEQ ID NO: 204, or an amino acid sequence having at least 70%, at least 75%, at least 80%, at least 85%, at least 90%, at least 95%, at least 96%, at least 97%, at least 98%, at least 99%, or up to and including 100% sequence identity with SEQ ID NO: 204.

[0060] The inhibitor utilized in the composition may be an antibody, a small molecule, a small interfering RNA (siRNA), a small non-coding microRNA, or a dominant negative variant of an MMR protein that inhibits the activity of a wild type MMR protein (e.g., a dominant negative variant of MLH1). In certain embodiments, the inhibitor is an antibody that inhibits the activity of one or more proteins of the DNA mismatch repair pathway. In some embodiments, the inhibitor is a small molecule that inhibits the activity of one or more proteins of the DNA mismatch repair pathway. In certain embodiments, the inhibitor is a small interfering RNA (siRNA) or a small non-coding microRNA that inhibits the activity of one or more proteins of the DNA mismatch repair pathway. In some embodiments, the inhibitor is a dominant negative variant of MLH1 that inhibits MLH1.

[0061] In some embodiments, the dominant negative variant is (a) MLH1 E34A (SEQ ID NO: 222), (b) MLH1 Δ756 (SEQ ID NO: 208), (c) MLH1 Δ754-756 (SEQ ID NO: 209), (d) MLH1 E34A Δ754-756 (SEQ ID NO: 210), (e) MLH1 1-335 (SEQ ID NO: 211), (f) MLH1 1-335 E34A (SEQ ID NO: 212), (g) MLH1 1-335 NLS^{SV40} (SEQ ID NO: 213), (h) MLH1501-756 (SEQ ID NO: 215), (i) MLH1 501-753 (SEQ ID NO: 216), (j) MLH1 461-753 (SEQ ID NO: 218), or (k) NLS^{SV40} MLH1 501-753 (SEQ ID NO: 223), or a polypeptide comprising an amino acid sequence having at least 70%, at least 75%, at least 80%, at least 85%, at least 90%, at least 95%, at least 96%, at least 97%, at least 98%, at least 99%, or up to and including 100% sequence identity with any of SEQ ID NOs: 208-213, 215, 216, 218, 222, or 223.

[0062] The prime editors utilized in the compositions of the present disclosure comprise multiple components. In some embodiments, the prime editor comprises a napDNAbp and a polymerase. In some embodiments, the napDNAbp is a nuclease active Cas9 domain, a nuclease inactive Cas9 domain, or a Cas9 nickase domain or variant thereof. In certain embodiments, the napDNAbp is selected from the group consisting of: Cas9, Cas12e, Cas12d, Cas12a, Cas12b1, Cas13a, Cas12c, Cas12b2, Cas13a, Cas12c, Cas12d, Cas12e, Cas12h, Cas12i, Cas12g, Cas12f (Cas14), Cas12f1, Cas12j (Cas(D), and Argonaute and optionally has a nickase activity. In certain embodiments, the napDNAbp comprises an amino acid sequence of any one of SEQ ID NOs: 2, 4-67, or 99 (PEmax) or an amino acid sequence having at least an 80%, 85%, 90%, 95%, or 99% sequence identity with any one of SEQ ID NOs: 2, 4-67, or 99 (PEmax). In certain embodiments, the napDNAbp comprises an amino acid sequence of SEQ ID NO: 2 or SEQ ID NO: 37 (i.e., the napDNAbp of PE1 and PE2) or an amino acid sequence having at least an 80%, 85%, 90%, 95%, or 99% sequence identity with SEQ ID NO: 2 or SEQ ID NO: 37. In some embodiments, the polymerase is a DNA-dependent DNA polymerase or an RNA-dependent DNA polymerase. In some embodiments, the polymerase is a reverse transcriptase. In certain embodiments, the reverse transcriptase comprises an amino acid sequence of any one of SEQ ID NOs: 69-98 or an amino acid sequence having at least an 80%, 85%, 90%, 95%, or 99% sequence identity with any one of SEQ ID NOs: 69-98.

[0063] The napDNAbp and the polymerase of the prime editor may be joined together to form a fusion protein. In some embodiments, the napDNAbp and the polymerase of the prime editor are joined by a linker to form a fusion protein. In certain embodiments, the linker comprises an amino acid sequence of any one of SEQ ID NOs: 102, 118-131, or an amino acid sequence having at least an 80%, 85%, 90%, 95%, or 99% sequence identity with any one of SEQ ID NOs: 102, 118-131. In some embodiments, the linker is 1, 2, 3, 4, 5, 6, 7, 8, 9, 10, 11, 12, 13, 14, 15, 16, 17, 18, 19, 20, 21, 22, 23, 24, 25, 26, 27, 28, 29, 30, 31, 32, 33, 34, 35, 36, 38, 38, 39, 40, 41, 42, 43, 44, 45, 46, 47, 48, 49, or 50 amino acids in length.

[0064] The components used in the compositions disclosed herein (e.g., the prime editor, the pegRNA, and/or the inhibitor of the DNA mismatch repair pathway) may be encoded on a DNA vector. In some embodiments, the prime editor, the pegRNA, and the inhibitor of the DNA mismatch repair pathway are encoded on one or more DNA vectors. In certain embodiments, the one or more DNA vectors comprise AAV or lentivirus DNA vectors. In some embodiments, the AAV vector is serotype 1, 2, 3, 4, 5, 6, 7, 8, 9, or 10.

[0065] The prime editors utilized in the presently disclosed compositions may also be further joined to additional components. In some embodiments, the prime editor as a fusion protein is further joined by a second linker to the inhibitor of the DNA mismatch repair pathway. In certain embodiments, the second linker is a self-hydrolyzing linker. In certain embodiments, the second linker comprises an amino acid sequence of any one of SEQ ID NOs: 102, 118-131, or 233-236, or an amino acid sequence having at least an 80%, 85%, 90%, 95%, or 99% sequence identity with any one of SEQ ID NOs: 102, 118-131, or 233-236. In some embodiments, the second linker is 1, 2, 3, 4, 5, 6, 7, 8, 9, 10, 11, 12, 13, 14, 15, 16, 17, 18, 19, 20, 21, 22, 23, 24, 25, 26, 27, 28, 29, 30, 31, 32, 33, 34, 35, 36, 37, 38, 39, 40, 41, 42, 43, 44, 45, 46, 47, 48, 49, or 50 amino acids in length.

[0066] In some embodiments, the one or more modifications to the nucleic acid molecule installed at the target site comprise one or more transitions, one or more transversions, one or more insertions, one or more deletions, or one more inversions. In certain embodiments, the one or more transitions are selected from the group consisting of: (a) T to C; (b) A to G; (c) C to T; and (d) G to A. In certain embodiments, the one or more transversions are selected from the group consisting of: (a) T to A; (b) T to G; (c) C to G; (d) C to A; (e) A to T; (f) A to C; (g) G to C; and (h) G to T. In certain embodiments, the one or more modifications comprises changing (1) a G:C basepair to a T:A basepair, (2) a G:C basepair to an A:T basepair, (3) a G:C basepair to a C:G basepair, (4) a T:A basepair to a G:C basepair, (5) a T:A basepair to an A:T basepair, (6) a T:A basepair to a C:G basepair, (7) a C:G basepair to a G:C basepair, (8) a C:G basepair to a T:A basepair, (9) a C:G basepair to an A:T basepair, (10) an A:T basepair to a T:A basepair, (11) an A:T basepair to a G:C basepair, or (12) an A:T basepair to a C:G basepair. In some embodiments, the one or more modifications comprises an insertion or deletion of 1, 2, 3, 4, 5, 6, 7, 8, 9, 10, 11, 12, 13, 14, 15, 16, 17, 18, 19, 20, 21, 22, 23, 24, or 25 nucleotides.

[0067] The compositions of the present disclosure may be used for making corrections to one or more disease-associated genes. In some embodiments, the one or more modifications comprises a correction to a disease-associated gene. In certain embodiments, the disease-associated gene is associated with a polygenic disorder selected from the group consisting of: heart disease; high blood pressure; Alzheimer's disease; arthritis; diabetes; cancer; and obesity. In certain embodiments, the disease-associated gene is associated with a monogenic disorder selected from the group consisting of: Adenosine Deaminase (ADA) Deficiency; Alpha-1 Antitrypsin Deficiency; Cystic Fibrosis; Duchenne Muscular Dystrophy; Galactosemia; Hemochromatosis; Huntington's Disease; Maple Syrup Urine Disease; Marfan Syndrome; Neurofibromatosis Type 1; Pachyonychia Congenita; Phenylketonuria; Severe Combined Immunodeficiency; Sickle Cell Disease; Smith-Lemli-Opitz Syndrome; a trinucleotide repeat disorder; a prion disease; and Tay-Sachs Disease.

[0068] In another aspect, this disclosure provides polynucleotides for editing a DNA target site by prime editing. In some embodiments, the polynucleotide comprises a nucleic acid sequence encoding a napDNAbp, a polymerase, and an inhibitor of the DNA mismatch repair pathway, wherein the napDNAbp and polymerase is capable in the presence of a pegRNA of installing one or more modifications in the DNA target site.

[0069] The polynucleotide may increase the efficiency of prime editing and/or decrease the frequency of indel formation. In some embodiments, the prime editing efficiency is increased by at least 1.5-fold, at least 2.0-fold, at least 2.5-fold, at least 3.0-fold, at least 3.5-fold, at least 4.0-fold, at least 4.5-fold, at least 5.0-fold, at least 5.5-fold, at least 6.0-fold, at least 6.5-fold, at least 7.0-fold, at least 7.5-fold, at least 8.0-fold, at least 8.5-fold, at least 9.0-fold, at least 9.5-fold, or at least 10.0-fold in the presence of the inhibitor of the DNA mismatch repair pathway. In some embodiments, the frequency of indel formation is decreased by at least 1.5-fold, at least 2.0-fold, at least 2.5-fold, at least 3.0-fold, at least 3.5-fold, at least 4.0-fold, at least 4.5-fold, at least 5.0-fold, at least 5.5-fold, at least 6.0-fold, at least 6.5-fold, at least 7.0-fold, at least 7.5-fold, at least 8.0-fold, at least 8.5-fold, at least 9.0-fold, at least 9.5-fold, or at least 10.0-fold in the presence of the inhibitor of the DNA mismatch repair pathway.

[0070] In some embodiments, the inhibitor of the DNA mismatch repair pathway inhibits one or more proteins of the DNA mismatch repair pathway. In some embodiments, the one or more proteins is selected from the group consisting of MLH1, PMS2 (or MutL alpha), PMS1 (or MutL beta). MLH3 (or MutL gamma), MutS alpha (MSH2-MSH6), MutS beta (MSH2-MSH3), MSH2, MSH6, PCNA, RFC, EXO1, POLδ, and PCNA. In certain embodiments, the one or more proteins is MLH1. In some embodiments, MLH1 comprises an amino acid sequence of SEQ ID NO: 204, or an amino acid sequence having at least 70%, at least 75%, at least 80%, at least 85%, at least 90%, at least 95%, at least 96%, at least 97%, at least 98%, at least 99%, or up to and including 100% sequence identity with SEQ ID NO: 204.

[0071] The inhibitor utilized in the polynucleotide may be an antibody, a small molecule, a small interfering RNA (siRNA), a small non-coding microRNA, or a dominant negative variant of an MMR protein that inhibits the activity of a wild type MMR protein (e.g., a dominant negative variant of (MLH1). In certain embodiments, the inhibitor is an antibody that inhibits the activity of one or more proteins of the DNA mismatch repair pathway. In some embodiments, the inhibitor is a small molecule that inhibits the activity of one or more proteins of the DNA mismatch repair pathway. In certain embodiments, the inhibitor is a small interfering RNA (siRNA) or a small non-coding microRNA that inhibits the activity of one or more proteins of the DNA mismatch repair pathway. In some embodiments, the inhibitor is a dominant negative variant of MLH1 that inhibits MLH1.

[0072] In some embodiments, the dominant negative variant is (a) MLH1 E34A (SEQ ID NO: 222), (b) MLH1 Δ756 (SEQ ID NO: 208), (c) MLH1 Δ754-756 (SEQ ID NO: 209), (d) MLH1 E34A Δ754-756 (SEQ ID NO: 210), (e) MLH1 1-335 (SEQ ID NO: 211), (f) MLH1 1-335 E34A (SEQ ID NO: 212), (g) MLH1 1-335 NLS^{SV40} (SEQ ID NO: 213), (h) MLH1 501-756 (SEQ ID NO: 215), (i) MLH1 501-753 (SEQ ID NO: 216), (j) MLH1 461-753 (SEQ ID NO: 218), or (k) NLS^{SV40} MLH1 501-753 (SEQ ID NO: 223), or a polypeptide comprising an amino acid sequence having at least 70%, at least 75%, at least 80%, at least 85%, at least 90%, at least 95%, at least 96%, at least 97%, at least 98%, at least 99%, or up to and including 100% sequence identity with any of SEQ ID NOs: 208-213, 215, 216, 218, 222, or 223.

[0073] The prime editors utilized in the polynucleotides of the present disclosure comprise multiple components (e.g., a napDNAbp and a polymerase). In some embodiments, the napDNAbp is a nuclease active Cas9 domain, a nuclease inactive Cas9 domain, or a Cas9 nickase domain or variant thereof. In certain embodiments, the napDNAbp is selected from the group consisting of: Cas9, Cas12e, Cas12d, Cas12a, Cas12b1, Cas13a, Cas12c, Cas12b2. Cas13a, Cas12c, Cas12d, Cas12e, Cas12h, Cas12i, Cas12g, Cas12f (Cas14), Cas12f1, Cas12j (CasΦ), and Argonaute and optionally has a nickase activity. In certain embodiments, the napDNAbp comprises an amino acid sequence of any one of SEQ ID NOs: 2, 4-67, or 99 (PEmax) or an amino acid sequence having at least an 80%, 85%, 90%, 95%, or 99% sequence identity with any one of SEQ ID NOs: 2, 4-67, or 99 (PEmax). In certain embodiments, the napDNAbp comprises an amino acid sequence of SEQ ID NO: 2 or SEQ ID NO: 37 (i.e., the napDNAbp of PE1 and PE2) or an amino acid sequence having at least an 80%, 85%, 90%, 95%, or 99% sequence identity with SEQ ID NO: 2 or SEQ ID NO: 37. In some embodiments, the polymerase is a DNA-dependent DNA polymerase or an RNA-dependent DNA polymerase. In some embodiments, the polymerase is a reverse transcriptase. In certain embodiments, the reverse transcriptase comprises an amino acid sequence of any one of SEQ ID NOs: 69-98 or an amino acid sequence having at least an 80%, 85%, 90%, 95%, or 99% sequence identity with any one of SEQ ID NOs: 69-98.

[0074] The napDNAbp and the polymerase of the prime editor may be joined together to form a fusion protein. In some embodiments, the napDNAbp and the polymerase of the prime editor are joined by a linker to form a fusion protein. In certain embodiments, the linker comprises an amino acid sequence of any one of SEQ ID NOs: 102, 118-131, or an amino acid sequence having at least an 80%, 85%, 90%, 95%, or 99% sequence identity with any one of SEQ ID NOs: 102, 118-131. In some embodiments, the linker is 1, 2, 3, 4, 5, 6, 7, 8, 9, 10, 11, 12, 13, 14, 15, 16, 17, 18, 19.20, 21, 22.23, 24, 25, 26, 27.28, 29, 30.31, 32, 33, 34, 35.36, 38, 38, 39, 40, 41, 42, 43, 44, 45, 46, 47, 48, 49, or 50 amino acids in length.

[0075] The polynucleotides disclosed herein may comprise vectors. In some embodiments, the polynucleotide is a DNA vector. In certain embodiments, the DNA vector is an AAV or lentivirus DNA vector. In some embodiments, the AAV vector is serotype 1, 2, 3, 4, 5, 6, 7, 8, 9, or 10.

[0076] The prime editors encoded by the presently disclosed polynucleotides may also be further joined to additional components. In some embodiments, the prime editor as a fusion protein is further joined by a second linker to the inhibitor of the DNA mismatch repair pathway. In certain embodiments, the second linker comprises a self-hydrolyzing linker. In certain embodiments, the second linker comprises an amino acid sequence of any one of SEQ ID NOs: 102, 118-131, or 233-236, or an amino acid sequence having at least an 80%, 85%, 90%, 95%, or 99% sequence identity with any one of SEQ ID NOs: 102, 118-131, or 233-236. In some embodiments, the second linker is 1, 2, 3, 4, 5, 6, 7, 8, 9, 10, 11, 12, 13, 14, 15, 16, 17, 18, 19, 20, 21, 22, 23, 24, 25, 26, 27, 28, 29, 30, 31, 32, 33, 34, 35, 36, 37, 38, 39, 40, 41, 42, 43, 44, 45, 46, 47, 48, 49, or 50 amino acids in length.

[0077] In some embodiments, the one or more modifications to the nucleic acid molecule installed at the target site comprise one or more transitions, one or more transversions, one or more insertions, one or more deletions, or one more inversions. In certain embodiments, the one or more transitions are selected from the group consisting of: (a) T to C; (b) A to G; (c) C to T; and (d) G to A. In certain embodiments, the one or more transversions are selected from the group consisting of: (a) T to A; (b) T to G; (c) C to G; (d) C to A; (e) A to T; (f) A to C; (g) G to C; and (h) G to T. In certain embodiments, the one or more modifications comprises changing (1) a G:C basepair to a T:A basepair, (2) a G:C basepair to an A:T basepair, (3) a G:C basepair to a C:G basepair, (4) a T:A basepair to a G:C basepair, (5) a T:A basepair to an A:T basepair, (6) a T:A basepair to a C:G basepair, (7) a C:G basepair to a G:C basepair, (8) a C:G basepair to a T:A basepair, (9) a C:G basepair to an A:T basepair, (10) an A:T basepair to a T:A basepair, (11) an A:T basepair to a G:C basepair, or (12) an A:T basepair to a C:G basepair. In some embodiments, the one or more modifications comprises an insertion or deletion of 1, 2, 3, 4, 5, 6, 7, 8, 9, 10, 11, 12, 13, 14, 15, 16, 17, 18, 19, 20, 21, 22, 23, 24, or 25 nucleotides.

[0078] The polynucleotides of the present disclosure may be used for making corrections to one or more disease-associated genes. In some embodiments, the one or more modifications comprises a correction to a disease-associated gene. In certain embodiments, the disease-associated gene is associated with a polygenic disorder selected from the group consisting of: heart disease; high blood pressure; Alzheimer's disease; arthritis; diabetes; cancer, and obesity. In certain embodiments, the disease-associated gene is associated with a monogenic disorder selected from the group consisting of: Adenosine Deaminase (ADA) Deficiency; Alpha-1 Antitrypsin Deficiency; Cystic Fibrosis; Duchenne Muscular Dystrophy; Galactosemia; Hemochromatosis; Huntington's Disease; Maple Syrup Urine Disease; Marfan Syndrome; Neurofibromatosis Type 1; Pachyonychia Congenita; Phenylketonuria; Severe Combined Immunodeficiency; Sickle Cell Disease; Smith-Lemli-Opitz Syndrome; a trinucleotide repeat disorder; a prion disease; and Tay-Sachs Disease.

[0079] In another aspect, the present disclosure provides cells. In some embodiments, the cell comprises any of the polynucleotides described herein.

[0080] In another aspect, the present disclosure provides pharmaceutical compositions. In some embodiments, the pharmaceutical composition comprises any of the compositions disclosed herein. In some embodiments, the pharmaceutical composition comprises any of the compositions disclosed herein and a pharmaceutically acceptable excipient. In some embodiments, the pharmaceutical composition comprises any of the polynucleotides disclosed herein. In some embodiments, the pharmaceutical composition comprises any of the polynucleotides disclosed herein and a pharmaceutically acceptable excipient.

[0081] In another aspect, the present disclosure provides kits. In some embodiments, the kit comprises any of the compositions disclosed herein, a pharmaceutical excipient, and instructions for editing a DNA target site by prime editing. In some embodiments, the kit comprises any of the polynucleotides disclosed herein, a pharmaceutical excipient, and instructions for editing a DNA target site by prime editing.

[0082] The present disclosure also provides methods and pegRNAs for prime editing whereby correction by the MMR pathway of the alterations introduced into a target nucleic acid molecule is evaded, without the need to provide an inhibitor of the MMR pathway. Surprisingly, pegRNAs designed with consecutive nucleotide mismatches compared to the endogenous sequence of a target site on a target nucleic acid, for example, pegRNAs that have three or more consecutive mismatching nucleotides, can evade correction by the MMR pathway, resulting in an increase in prime editing efficiency and a decrease in the frequency of indel formation compared to the introduction of a single nucleotide mismatch using prime editing. In addition, insertions or deletions of consecutive nucleotides at the target site of the target nucleic acid, for example, insertions or deletions greater than 10 nucleotides in length, introduced by prime editing also evade correction by the MMR pathway, resulting in an increase in prime editing efficiency and a decrease in the frequency of indel formation compared to the introduction of an insertion or deletion of less than 10 nucleotides in length using prime editing.

[0083] Thus, in another aspect, the present disclosure provides methods for editing a nucleic acid molecule by prime editing comprising contacting a nucleic acid molecule with a prime editor (e.g., PE2, PE3, or any of the other prime editors described herein) and a pegRNA with a DNA synthesis template on its extension arm comprising three or more consecutive nucleotide mismatches relative to the endogenous sequence of a target site on the nucleic acid molecule. In some embodiments, at least one of the consecutive nucleotide mismatches results in an alteration in the amino acid sequence of a protein expressed from the nucleic acid molecule, while at least one of the remaining nucleotide mismatches is a silent mutation. The silent mutations may be in coding regions of the target nucleic acid molecule (i.e., in a part of a gene that encodes a protein), or the silent mutations may be in non-coding regions of the target nucleic acid molecule. In some embodiments, when the silent mutations are in a coding region, the silent mutations introduce into the nucleic acid molecule one or more alternate codons encoding the same amino acid as the unedited nucleic acid molecule. In some embodiments, when the silent mutations are in a non-coding region, the silent mutations are present in a region of the nucleic acid molecule that does not influence splicing, gene regulation, RNA lifetime, or other biological properties of the target site on the nucleic acid molecule.

[0084] Any number of consecutive nucleotide mismatches compared to the sequence of the target site can be designed in the DNA synthesis template of a pegRNA to achieve the benefits of evading correction by the MMR pathway, and thereby increase prime editing efficiency and/or reduce indel formation. In some embodiments, the DNA synthesis template comprises at least three consecutive nucleotide mismatches compared to the sequence of the target site. In some embodiments, the DNA synthesis template of the extension arm on the pegRNA comprises 2, 3, 4, 5, 6, 7, 8, 9, 10, 11, 12, 13, 14, 15, 16, 17, 18, 19, 20, 21, 22, 23, 24, or 25 consecutive nucleotide mismatches relative to the endogenous sequence of a target site in the nucleic acid molecule edited by prime editing. In some embodiments, the DNA synthesis template of the extension arm on the pegRNA comprises three or more, four or more, five or more, six or more, seven or more, eight or more, nine or more, or ten or more consecutive nucleotide mismatches relative to the endogenous sequence of a target site on the nucleic acid molecule. In certain embodiments, the use of three or more consecutive nucleotide mismatches results in an increase in prime editing efficiency by at least 1.5-fold, at least 2.0-fold, at least 2.5-fold, at least 3.0-fold, at least 3.5-fold, at least 4.0-fold, at least 4.5-fold, at least 5.0-fold, at least 5.5-fold, at least 6.0-fold, at least 6.5-fold, at least 7.0-fold, at least 7.5-fold, at least 8.0-fold, at least 8.5-fold, at least 9.0-fold, at least 9.5-fold, or at least 10.0-fold relative to a method using a pegRNA comprising a DNA synthesis template comprising only one consecutive nucleotide mismatch relative to the endogenous sequence of a target site on the nucleic acid molecule. In certain embodiments, the use of three or more consecutive nucleotide mismatches results in a decrease in the frequency of indel formation by at least 1.5-fold, at least 2.0-fold, at least 2.5-fold, at least 3.0-fold, at least 3.5-fold, at least 4.0-fold, at least 4.5-fold, at least 5.0-fold, at least 5.5-fold, at least 6.0-fold, at least 6.5-fold, at least 7.0-fold, at least 7.5-fold, at least 8.0-fold, at least 8.5-fold, at least 9.0-fold, at least 9.5-fold, or at least 10.0-fold relative to a method using a peg RNA comprising a DNA synthesis template comprising only one consecutive nucleotide mismatch relative to the endogenous sequence of a target site on the nucleic acid molecule.

[0085] In another aspect, the present disclosure provides methods for editing a nucleic acid molecule by prime editing comprising contacting a nucleic acid molecule with a prime editor (e.g., PE2, PE3, or any of the other prime editors described herein) and a pegRNA with a DNA synthesis template on its extension arm comprising an insertion or deletion of 10 or more contiguous nucleotides relative to the endogenous sequence of a target site on the nucleic acid molecule. In some embodiments, the DNA synthesis template of a pegRNA can be designed to introduce insertions or deletions greater than 3 nucleotides to avoid or reduce the impact of mismatch correction by the cellular MMR pathway, thereby improving prime editing efficiency. In some embodiments, the DNA synthesis template of the pegRNA is designed to introduce one or more insertions and/or deletions of 3, 4, 5, 6, 7, 8, 9, 10, or more contiguous nucleotides to avoid or reduce the impact of mismatch correction by the cellular MMR pathway, thereby improving prime editing efficiency. In some embodiments, insertions or deletions of any length greater than 10 contiguous nucleotides can be used to achieve the benefits of evading correction by the MMR pathway. In some embodiments, the DNA synthesis template comprises an insertion of 3, 4, 5, 6, 7, 8, 9, 10, 11, 12, 13, 14, 15, 16, 17, 18, 19, 20, 21, 22, 23, 24, or 25 contiguous nucleotides relative to the endogenous sequence of a target site on a nucleic acid molecule edited by prime editing. In some embodiments, the DNA synthesis template comprises a deletion of 3, 4, 5, 6, 7, 8, 9, 10, 11, 12, 13, 14, 15, 16, 17, 18, 19, 20, 21, 22, 23, 24, or 25 contiguous nucleotides relative to the endogenous sequence of a target site on a nucleic acid molecule edited by prime editing. In some embodiments, the DNA synthesis template comprises an insertion of 10, 11, 12, 13, 14, 15, 16, 17, 18, 19, 20, 21, 22, 23, 24, 25, 26, 27, 28, 29, 30, 31, 32, 33, 34, 35, 36, 37, 38, 39, or 40 contiguous nucleotides relative to the endogenous sequence of a target site on a nucleic acid molecule edited by prime editing. In some embodiments, the DNA synthesis template comprises a deletion of 10, 11, 12, 13, 14, 15, 16, 17, 18, 19, 20, 21, 22, 23, 24, 25, 26, 27, 28, 29, 30, 31, 32, 33, 34, 35, 36, 37, 38, 39, or 40 contiguous nucleotides relative to the endogenous sequence of a target site on a nucleic acid molecule edited by prime editing. In some embodiments, the DNA synthesis template comprises an insertion or deletion of 11 or more contiguous nucleotides, 12 or more contiguous nucleotides, 13 or more contiguous nucleotides, 14 or more contiguous nucleotides, 15 or more contiguous nucleotides, 16 or more contiguous nucleotides, 17 or more contiguous nucleotides, 18 or more contiguous nucleotides, 19 or more contiguous nucleotides, 20 or more contiguous nucleotides, 21 or more contiguous nucleotides, 22 or more contiguous nucleotides, 23 or more contiguous nucleotides, 24 or more contiguous nucleotides, or 25 or more contiguous nucleotides relative to a target site on a nucleic acid molecule. In certain embodiments, the DNA synthesis template comprises an insertion or deletion of 15 or more contiguous nucleotides relative to the endogenous sequence of a target site on the nucleic acid molecule.

[0086] In some embodiments, prime editing with a pegRNA designed to introduce an insertion and/or deletion of multiple contiguous nucleotides, for example, three or more contiguous nucleotides, relative to the endogenous sequence of a target site results in an increase in prime editing efficiency compared to prime editing with a corresponding control pegRNA (e.g., a control pegRNA that does not introduce an insertion or deletion of three or more contiguous nucleotides) by at least 1.5-fold, at least 2.0-fold, at least 2.5-fold, at least 3.0-fold, at least 3.5-fold, at least 4.0-fold, at least 4.5-fold, at least 5.0-fold, at least 5.5-fold, at least 6.0-fold, at least 6.5-fold, at least 7.0-fold, at least 7.5-fold, at least 8.0-fold, at least 8.5-fold, at least 9.0-fold, at least 9.5-fold, or at least 10.0-fold. In some embodiments, prime editing with a pegRNA designed to introduce an insertion or deletion of 3, 4, 5, 6, 7, 8, 9, 10, or more contiguous nucleotides relative to the endogenous sequence of a target site results in an increase in prime editing efficiency relative to prime editing with a corresponding control pegRNA (e.g., a control pegRNA that does not introduce insertion or deletion of the three or more contiguous nucleotides) by at least 1.5-fold, at least 2.0-fold, at least 2.5-fold, at least 3.0-fold, at least 3.5-fold, at least 4.0-fold, at least 4.5-fold, at least 5.0-fold, at least 5.5-fold, at least 6.0-fold, at least 6.5-fold, at least 7.0-fold, at least 7.5-fold, at least 8.0-fold, at least 8.5-fold, at least 9.0-fold, at least 9.5-fold, or at least 10.0-fold. In some embodiments, making an insertion or deletion of 10 or more contiguous nucleotides results in an increase in prime editing efficiency by at least 1.5-fold, at least 2.0-fold, at least 2.5-fold, at least 3.0-fold, at least 3.5-fold, at least 4.0-fold, at least 4.5-fold, at least 5.0-fold, at least 5.5-fold, at least 6.0-fold, at least 6.5-fold, at least 7.0-fold, at least 7.5-fold, at least 8.0-fold, at least 8.5-fold, at least 9.0-fold, at least 9.5-fold, or at least 10.0-fold relative to a method using a pegRNA comprising a DNA synthesis template comprising an insertion or deletion of fewer than 10 nucleotides relative to the endogenous sequence of a target site on the nucleic acid molecule. In some embodiments, making an insertion or deletion of 10 or more nucleotides results in a decrease in the frequency of indel formation by at least 1.5-fold, at least 2.0-fold, at least 2.5-fold, at least 3.0-fold, at least 3.5-fold, at least 4.0-fold, at least 4.5-fold, at least 5.0-fold, at least 5.5-fold, at least 6.0-fold, at least 6.5-fold, at least 7.0-fold, at least 7.5-fold, at least 8.0-fold, at least 8.5-fold, at least 9.0-fold, at least 9.5-fold, or at least 10.0-fold relative to a method using a pegRNA comprising a DNA synthesis template comprising an insertion or deletion of fewer than 10 nucleotides relative to the endogenous sequence of a target site on the nucleic acid molecule.

[0087] In another aspect, the present disclosure also provides pegRNAs useful for editing a nucleic acid molecule by prime editing while evading correction by the MMR pathway of the alterations introduced into the nucleic acid molecule, thereby increasing prime editing efficiency and/or reducing indel formation. In some embodiments, the extension arm of the pegRNAs provided by the present disclosure comprise three or more consecutive nucleotide mismatches relative to the endogenous sequence of a target site on the nucleic acid molecule. In some embodiments, at least one of the three consecutive nucleotide mismatches relative to the endogenous sequence of the target site is a silent mutation. In some embodiments, at least one of the consecutive nucleotide mismatches results in an alteration in the amino acid sequence of a protein expressed from the target nucleic acid molecule, while at least one of the remaining nucleotide mismatches is a silent mutation. The silent mutations may be in coding regions of the target nucleic acid molecule (i.e., in a part of a gene that encodes a protein), or the silent mutations may be in non-coding regions of the target nucleic acid molecule. In some embodiments, when the silent mutations are in a coding region, the silent mutations introduce into the nucleic acid molecule one or more alternate codons encoding the same amino acid as the unedited nucleic acid molecule. In some embodiments, when the silent mutations are in a non-coding region, the silent mutations are present in a region of the nucleic acid molecule that does not influence splicing, gene regulation, RNA lifetime, or other biological properties of the target site on the nucleic acid molecule.

[0088] Any number of consecutive nucleotide mismatches of three or more can be incorporated into the extension arm of the pegRNAs described herein to achieve the benefits of evading correction by the MMR pathway. In some embodiments, the DNA synthesis template of the extension arm of the pegRNA comprises 2, 3, 4, 5, 6, 7, 8, 9, 10, 11, 12, 13, 14, 15, 16, 17, 18, 19, 20, 21, 22, 23, 24, or 25 consecutive nucleotide mismatches relative to the endogenous sequence of a target site on the nucleic acid molecule edited by prime editing. In some embodiments, the DNA synthesis template of the extension arm of the pegRNA comprises at least three consecutive nucleotide mismatches relative to the endogenous sequence of a target site on the nucleic acid molecule edited by prime editing. In some embodiments, the DNA synthesis template of the extension arm of the pegRNA comprises 3, 4, 5, 6, 7, 8, 9, 10, 11, 12, 13, 14, 15, 16, 17, 18, 19, or 20 consecutive nucleotide mismatches relative to the endogenous sequence of a target site on the nucleic acid molecule edited by prime editing. In some embodiments, the DNA synthesis template of the extension arm of the pegRNA comprises 3, 4, 5, 6, 7, 8, 9, or 10 consecutive nucleotide mismatches relative to the endogenous sequence of a target site on the nucleic acid molecule edited by prime editing. In some embodiments, the DNA synthesis template of the extension arm on the pegRNA comprises three or more, four or more, five or more, six or more, seven or more, eight or more, nine or more, or ten or more consecutive nucleotide mismatches relative to the endogenous sequence of a target site on the nucleic acid molecule. In certain embodiments, the presence of three or more consecutive nucleotide mismatches on the extension arm of the pegRNA results in an increase in prime editing efficiency by at least 1.5-fold, at least 2.0-fold, at least 2.5-fold, at least 3.0-fold, at least 3.5-fold, at least 4.0-fold, at least 4.5-fold, at least 5.0-fold, at least 5.5-fold, at least 6.0-fold, at least 6.5-fold, at least 7.0-fold, at least 7.5-fold, at least 8.0-fold, at least 8.5-fold, at least 9.0-fold, at least 9.5-fold, or at least 10.0-fold relative to a pegRNA comprising a DNA synthesis template comprising only one consecutive nucleotide mismatch relative to the endogenous sequence of a target site on the nucleic acid molecule. In certain embodiments, the use of three or more consecutive nucleotide mismatches results in a decrease in the frequency of indel formation by at least 1.5-fold, at least 2.0-fold, at least 2.5-fold, at least 3.0-fold, at least 3.5-fold, at least 4.0-fold, at least 4.5-fold, at least 5.0-fold, at least 5.5-fold, at least 6.0-fold, at least 6.5-fold, at least 7.0-fold, at least 7.5-fold, at least 8.0-fold, at least 8.5-fold, at least 9.0-fold, at least 9.5-fold, or at least 10.0-fold relative to a pegRNA comprising a DNA synthesis template comprising only one consecutive nucleotide mismatch relative to the endogenous sequence of a target site on the nucleic acid molecule.

[0089] In another aspect, the present disclosure provides a prime editor system for site specific genome modification comprising (a) a prime editor comprising (i) a nucleic acid programmable DNA binding protein (napDNAbp) and (ii) a DNA polymerase, and (b) an inhibitor of the DNA mismatch repair pathway. In some embodiments, the inhibitor of the DNA mismatch repair pathway inhibits one or more proteins of the DNA mismatch repair pathway (e.g., MLH1, PMS2 (or MutL alpha), PMS1 (or MutL beta), MLH3 (or MutL gamma). MutS alpha (MSH2-MSH6), MutS beta (MSH2-MSH3), MSH2, MSH6, PCNA, RFC, EXO1, POLδ, and/or PCNA). In some embodiments, the one or more proteins is MLH1. In certain embodiments, the MLH1 comprises an amino acid sequence of SEQ ID NO: 204, or an amino acid sequence having at least 70%, at least 75%, at least 80%, at least 85%, at least 90%, at least 95%, at least 96%, at least 97%, at least 98%, at least 99%, or up to and including 100% sequence identity with SEQ ID NO: 204.

[0090] Any inhibitor of the DNA mismatch repair pathway may be used in the systems described herein. In some embodiments, the inhibitor is an antibody that inhibits the activity of one or more proteins of the DNA mismatch repair pathway. In some embodiments, the inhibitor is a small molecule that inhibits the activity of one or more proteins of the DNA mismatch repair pathway. In some embodiments, the inhibitor is a small interfering RNA (siRNA) or a small non-coding microRNA that inhibits the activity of one or more proteins of the DNA mismatch repair pathway. In some embodiments, the inhibitor is a dominant negative variant of an MMR protein that inhibits the activity of a wild type MMR protein (e.g., a dominant negative variant of MLH1 that inhibits MLH1).

[0091] In certain embodiments, the dominant negative variant used in the systems of the present disclosure is (a) MLH1 E34A (SEQ ID NO: 222), (b) MLH1 Δ756 (SEQ ID NO: 208), (c) MLH1 Δ754-756 (SEQ ID NO: 209), (d) MLH1 E34A Δ754-756 (SEQ ID NO: 210), (e) MLH1 1-335 (SEQ ID NO: 211), (f) MLH1 1-335 E34A (SEQ ID NO: 212), (g) MLH1 1-335 NLS^{SV40} (SEQ ID NO: 213), (h) MLH1501-756 (SEQ ID NO: 215), (i) MLH1501-753 (SEQ ID NO: 216), (j) MLH1 461-753 (SEQ ID NO: 218), or (k) NLS^{SV40} MLH1 501-753 (SEQ ID NO: 223), or a polypeptide comprising an amino acid sequence having at least 70%, at least 75%, at least 80%, at least 85%, at least 90%, at least 95%, at least 96%, at least 97%, at least 98%, at least 99%, or up to and including 100% sequence identity with any of SEQ ID NOs: 208-213, 215, 216, 218, 222, or 223. The present disclosure also contemplates methods for performing prime editing on a nucleic acid molecule in a cell in which MMR activity is knocked out entirely (e.g., by knocking down one or more genes involved in the MMR pathway in the genome of the cell). Such methods provide the benefits of inhibiting MMR (e.g., improved editing efficiency and decreased indel formation) without the need to provide an inhibitor of MMR. Thus, in another aspect, the present disclosure provides methods for editing a nucleic acid molecule by prime editing comprising: contacting a nucleic acid molecule with a prime editor and a pegRNA, thereby installing one or more modifications to the nucleic acid molecule at a target site, wherein the nucleic acid molecule is in a cell comprising a knockout of one or more genes involved in the DNA mismatch repair (MMR) pathway. In some embodiments, the method further comprises contacting the nucleic acid molecule with a second strand nicking gRNA. In certain embodiments, the prime editing efficiency is increased by at least 1.5-fold, at least 2.0-fold, at least 2.5-fold, at least 3.0-fold, at least 3.5-fold, at least 4.0-fold, at least 4.5-fold, at least 5.0-fold, at least 5.5-fold, at least 6.0-fold, at least 6.5-fold, at least 7.0-fold, at least 7.5-fold, at least 8.0-fold, at least 8.5-fold, at least 9.0-fold, at least 9.5-fold, or at least 10.0-fold relative to a method performed in a cell that does not comprise a knockout of one or more genes involved in MMR. In certain embodiments, the frequency of indel formation is decreased by at least 1.5-fold, at least 2.0-fold, at least 2.5-fold, at least 3.0-fold, at least 3.5-fold, at least 4.0-fold, at least 4.5-fold, at least 5.0-fold, at least 5.5-fold, at least 6.0-fold, at least 6.5-fold, at least 7.0-fold, at least 7.5-fold, at least 8.0-fold, at least 8.5-fold, at least 9.0-fold, at least 9.5-fold, or at least 10.0-fold relative to a method performed in a cell that does not comprise a knockout of one or more genes involved in MMR. In some embodiments, the one or more genes involved in MMR is selected from the group consisting of genes encoding the proteins MLH1, PMS2 (or MutL alpha), PMS1 (or MutL beta), MLH3 (or MutL gamma), MutS alpha (MSH2-MSH6), MutS beta (MSH2-MSH3), MSH2, MSH6, PCNA, RFC, EXO1, POLδ, and PCNA. In certain embodiments, the one or more genes is the gene encoding MLH1 (e.g., comprising an amino acid sequence of SEQ ID NO: 204, or an amino acid sequence having at least 70%, at least 75%, at least 80%, at least 85%, at least 90%, at least 95%, at least 96%, at least 97%, at least 98%, at least 99%, or up to and including 100% sequence identity with SEQ ID NO: 204).

[0092] In another aspect, the present disclosure provides methods for editing a nucleic acid molecule by prime editing comprising: contacting a nucleic acid molecule with a prime editor, a pegRNA, and an inhibitor of p53, thereby installing one or more modifications to the nucleic acid molecule at a target site. In some embodiments, the method further comprises contacting the nucleic acid molecule with a second strand nicking gRNA.

[0093] In some embodiments, the prime editing efficiency is increased by at least 1.5-fold, at least 2.0-fold, at least 2.5-fold, at least 3.0-fold, at least 3.5-fold, at least 4.0-fold, at least 4.5-fold, at least 5.0-fold, at least 5.5-fold, at least 6.0-fold, at least 6.5-fold, at least 7.0-fold, at least 7.5-fold, at least 8.0-fold, at least 8.5-fold, at least 9.0-fold, at least 9.5-fold, at least 10.0-fold, at least 11-fold, at least 12-fold, at least 13-fold, at least 14-fold, at least 15-fold, at least 16-fold, at least 17-fold, at least 18-fold, at least 19-fold, at least 20-fold, at least 21-fold, at least 22-fold, at least 23-fold, at least 24-fold, at least 25-fold, at least 26-fold, at least 27-fold, at least 28-fold, at least 29-fold, at least 30-fold, at least 31-fold, at least 32-fold, at least 33-fold, at least 34-fold, at least 35-fold, at least 36-fold, at least 37-fold, at least 38-fold, at least 39-fold, at least 40-fold, at least 41-fold, at least 42-fold, at least 43-fold, at least 44-fold, at least 45-fold, at least 46-fold, at least 47-fold, at least 48-fold, at least 49-fold, at least 50-fold, at least 51-fold, at least 52-fold, at least 53-fold, at least 54-fold, at least 55-fold, at least 56-fold, at least 57-fold, at least 58-fold, at least 59-fold, at least 60-fold, at least 61-fold, at least 62-fold, at least 63-fold, at least 64-fold, at least 65-fold, at least 66-fold, at least 67-fold, at least 68-fold, at least 69-fold, at least 70-fold, at least 71-fold, at least 72-fold, at least 73-fold, at least 74-fold, or at least 75-fold, in the presence of the inhibitor of p53. In some embodiments, the frequency of indel formation is decreased by at least 1.5-fold, at least 2.0-fold, at least 2.5-fold, at least 3.0-fold, at least 3.5-fold, at least 4.0-fold, at least 4.5-fold, at least 5.0-fold, at least 5.5-fold, at least 6.0-fold, at least 6.5-fold, at least 7.0-fold, at least 7.5-fold, at least 8.0-fold, at least 8.5-fold, at least 9.0-fold, at least 9.5-fold, at least 10.0-fold, at least 11-fold, at least 12-fold, at least 13-fold, at least 14-fold, at least 15-fold, at least 16-fold, at least 17-fold, at least 18-fold, at least 19-fold, at least 20-fold, at least 21-fold, at least 22-fold, at least 23-fold, at least 24-fold, at least 25-fold, at least 26-fold, at least 27-fold, at least 28-fold, at least 29-fold, at least 30-fold, at least 31-fold, at least 32-fold, at least 33-fold, at least 34-fold, at least 35-fold, at least 36-fold, at least 37-fold, at least 38-fold, at least 39-fold, at least 40-fold, at least 41-fold, at least 42-fold, at least 43-fold, at least 44-fold, at least 45-fold, at least 46-fold, at least 47-fold, at least 48-fold, at least 49-fold, at least 50-fold, at least 51-fold, at least 52-fold, at least 53-fold, at least 54-fold, at least 55-fold, at least 56-fold, at least 57-fold, at least 58-fold, at least 59-fold, at least 60-fold, at least 61-fold, at least 62-fold, at least 63-fold, at least 64-fold, at least 65-fold, at least 66-fold, at least 67-fold, at least 68-fold, at least 69-fold, at least 70-fold, at least 71-fold, at least 72-fold, at least 73-fold, at least 74-fold, or at least 75-fold, in the presence of the inhibitor of p53.

[0094] In some embodiments, the inhibitor of p53 is a protein. In certain embodiments, the inhibitor of p53 is the protein i53. In some embodiments, the inhibitor of p53 is an antibody that inhibits the activity of p53. In some embodiments, the inhibitor of p53 is a small molecule that inhibits the activity of p53. In some embodiments, the inhibitor of p53 is a small interfering RNA (siRNA) or a small non-coding microRNA that inhibits the activity of p53.

[0095] In another aspect, the present disclosure describes improved prime editor fusion proteins, including PEmax of SEQ ID NO: 99. The disclosure also contemplates fusion proteins having an amino acid sequence with a sequence identity of at least 80%, at least 85%, at least 90%, at least 95%, at least 96%, at least 97%, at least 98%, at least 99%, or at least up to 100% with SEQ ID NO: 99.

[0096] The inventors have surprisingly found that the editing efficiency of prime editing may be significantly increased (e.g., 2-fold increase, 3-fold increase, 4-fold increase, 5-fold increase, 6-fold increase, 7-fold increase, 8-fold increase, 9-fold increase, or 10-fold increase or more) when one or more components of the canonical prime editor fusion protein (i.e., PE2) are modified. Modifications may include a modified amino acid sequence of one or more components (e.g., a Cas9 component, a reverse transcriptase component, or a linker).

[0097] In other aspects, the present disclosure also provides compositions and pharmaceutical compositions comprising PEmax, methods of prime editing using PEmax, polynucleotides and vectors encoding PEmax, and kits and cells comprising PEmax.

[0098] It should be appreciated that the foregoing concepts, and additional concepts discussed below, may be arranged in any suitable combination, as the present disclosure is not limited in this respect. Further, other advantages and novel features of the present disclosure will become apparent from the following detailed description of various non-limiting embodiments when considered in conjunction with the accompanying figures.

### BRIEF DESCRIPTION OF THE DRAWINGS

[0099] The following drawings form part of the present specification and are included to further demonstrate certain aspects of the present disclosure, which can be better understood by reference to one or more of these drawings in combination with the detailed description of specific embodiments presented herein.

[0100] FIG. 1 provides a schematic showing that prime editing enables guide RNA-templated genomic manipulations. DNA prime editing intermediates capable of being repaired by cellular factors are shown in boxes.

[0101] FIG. 2 provides a schematic for a DNA repair CRISPRi screen for prime editing outcomes.

[0102] FIGS. 3A-3C show optimization of prime editing efficiency at the target site. FIG. 3A provides a schematic for the optimization process. FIG. 3B shows percent reads with a specified modification at a target site in HeLa cells. FIG. 3C shows percent reads with a specified modification at a target site with blasticidin selection in HeLa cells.

[0103] FIGS. 4A-4B show a prime editing CRISPRi screen with a DNA repair library. FIG. 4A provides a schematic of the screening process. FIG. 4B shows percent reads with a specified modification in bulk editing of post-screen HeLa cells.

[0104] FIGS. 5A-5B show that the CRISPRi screen reveals that DNA mismatch repair limits prime editing efficiency. Knockdown of mismatch repair proteins (MSH2. MSH6, PMS2, and MLH1) improves the efficiency of PE2 by 3-fold and PE3 by 2-fold.

[0105] FIGS. 6A-6C show that siRNA knockdown of MMR improves prime editing in HEK293T cells. Editing results at multiple endogenous loci validate the findings of the CRISPRi screen.

[0106] FIGS. 7A-7B show that complete MMR knockout dramatically enhances prime editing. In the absence of MMR, PE2 editing efficiency is shown to match PE3 editing efficiency.

[0107] FIG. 8A provides a schematic for the mechanism of mismatch repair (MMR). In the first step, MSH2:MSH6 (MutSα) binds the mismatch and recruits MLH1:PMS2 (MutLα). The DNA nick signals to MMR which strand to repair. In the second step, MutLα indiscriminately incises the nicked strand 5′ and 3′ of the mismatch. In the third step, EXO1 excises the mismatch from MutLα-generated nicks. In the fourth step, POLδ resynthesizes the excised strand, followed by LIG1 ligation.

[0108] FIG. 8B provides yet another schematic for the mechanism of mismatch repair, MMR, in eukaryotic cells. The left side of the schematic depicts 5′ MMR. (A) The MutS homolog proteins (MSH, purple) MutSα (MSH2-MSH6), or MutSβ (MSH2-MSH3) recognize and bind a mismatch. RPA bound to single-strand DNA prevents EXO1 from accessing and degrading DNA. (B) In the sliding clamp model, MutSα/β at a mismatch binds ATP and undergoes nucleotide switch activation, becoming a sliding clamp that diffuses along the DNA. Multiple MSH clamps are loaded at a single mismatch. The interaction of EXO1 with MSH sliding clamps overcomes the RPA barrier and activates EXO1 for 5′ to 3′ excision from the 5′ nick. MutL homolog proteins (MLK) (MutLα is ScMlh1-Pms1 or HsMLH1-PMS2) bind ATP and may interact with MSH sliding clamps, though MLH is not absolutely required in vitro for 5′ MMR. In other models, MSH remains at the mismatch to authorize excision or can load multiple MLH clamps onto the DNA in the vicinity of the mismatch (not shown). (C) In the sliding clamp model, the EXO1/MSH complex dissociates after excising several hundred nucleotides. Iterative rounds of MSH-EXO1 excision create an excision tract coated with RPA that extends from the 5′ nick to just beyond the mismatch. MLH may limit excision by modulating the number of MSH clamps on DNA. (D) RFC (not shown) loads PCNA clamps with specific orientation at 3′ termini of strand breaks or gaps, and PCNA facilitates high-fidelity DNA synthesis by Pol δ or ε. (E) DNA ligase I seals the nick. The right side of the schematic depicts 3′ MMR. (A) MSH recognizes a mismatch. (B) In the sliding clamp model, ATP-dependent binding and nucleotide switching creates MSH sliding clamps that diffuse from the mismatch. The interaction of ATP-bound MLH heterodimers with MSH sliding clamps and PCNA oriented with respect to 3′ termini activates MLH strand-specific nicking. Alternatively, ATP-activated MSH may remain at the mismatch to load MLH and activate nicking (not shown). (C) Excision is EXO1-dependent or -independent, leading to an RPA-coated excision track. An EXO1-independent Pol δ strand-displacement pathway is not shown. (D) Pol δ or ε with the aid of PCNA completes gap filling. (E) DNA ligase I seals the nick.

[0109] FIGS. 9A-9C provide a schematic of mismatch repair of PE2 intermediates. MMR inhibition provides additional time for flap ligation, removing the strand discrimination signal for repair of the heteroduplex.

[0110] FIG. 10 shows that expression of dominant-negative MLH1 mutants boosts PE2 efficiency. MLH1 dominant-negative mutants improve PE2 efficiency by 2- to 4-fold. RNF2+3 G to C is not responsive to MMR-inhibition.

[0111] FIGS. 11A-11B show the effect of MLH1 mutants on PE3. MLH1 mutants reduce PE3 indels by half.

[0112] FIGS. 12A-12B show that MLH1 mutant improvements translate to other sites. FIG. 12A shows that PE2 editing efficiency increases with MLH1 mutants, and only RNF2+3 G to C is resistant to MMR-inhibition. FIG. 12B shows that MLH1 mutants reduce the occurrence of indels by half.

[0113] FIG. 13 provides a schematic showing mismatch repair of PE3 intermediates.

[0114] FIG. 14 provides a schematic showing that mismatch repair differentially resolves PE3 intermediates. Mismatch repair is required for the one edit-favored intermediate.

[0115] FIG. 15A-15H show screening of MLH1 mutants for smaller size and improved activity. FIG. 15A shows that MLH1 Δ754-756 most strongly promotes PE2 editing (hereafter named MLH1dn). MLH1 N-terminal domain approaches the effectiveness of MLH1dn (hereafter named MLH1^{NTD}). MLH1 dominant negative mutants may function by saturating binding of MutS. FIG. 15B shows that the MLH1 N-terminal domain+NLS approaches the activity of MLH1neg. FIG. 15C shows that MLH1dn fusion to PE by a self-cleavable P2A linker (PE-2A-MLH1dn) can improve prime editing efficiency. FIGS. 15D-15F show that MMR KD phenocopies MLH1neg expression. FIGS. 15G-15H show that the efficiency of PE2 and PE3 is equal in the absence of MMR, suggesting that the complementary nick only serves to bias MMR.

[0116] FIG. 16 shows that MLH1dn reduces indels for PE3. Silent pegRNA is pegRNA that does not encode an edit or produce a mismatch. MLH1dn only reduces PE3 indels if a mismatch is generated.

[0117] FIG. 17 show that mismatch repair of PE heteroduplexes produces a diffuse indel pattern. Indel distribution is broad for PE3 for these edits, but inhibiting MMR with MLH1dn narrows that distribution. This suggests that MMR makes incisions after mismatch recognition that contribute to the indels generated by PE3.

[0118] FIG. 18 shows mismatch repair of PE3 intermediates.

[0119] FIGS. 19A-19B show that MMR excision of the target locus generates indels in PE3.

[0120] FIGS. 20A-20B show that MMR knockdown or knockout has no effect on RNF2+3 G to C. This suggests that the RNF2 site is not repaired by MMR or the resulting C:C mismatch is not repaired by MMR.

[0121] FIGS. 21A-21C show that other substitution edits at RNF2 can be improved with MLH1dn.

[0122] FIGS. 22A-22B show that MLH1dn improves substitution edits at other sites, including HEK3. MLH1dn strongly enhances PE2 editing and lowers PE3 indels.

[0123] FIGS. 23A-23D show that MLH1dn improves substitution edits at other sites, including FANCF. MLH1dn strongly enhances PE2 editing and lowers PE3 indels.

[0124] FIGS. 24A-24B show that PE improvement by MHL1dn is mismatch dependent. MLH1dn increases PE2 editing by 2-fold on average in HEK293T cells. FIG. 24A shows that G to C edits (C:C mismatches) are unaffected by MMR in HEK293T cells. This suggests that G to C edits have a higher baseline efficiency than other substitutions. FIG. 24B shows a substantial increase in the ratio of edit:indel purity from MLH1dn used with PE3, which is also mismatch dependent.

[0125] FIGS. 25A-25D show that MLH1dn also improves the efficiency of small insertion and deletion edits. MMR is known to repair insertions and deletions <15 nucleotides in length.

[0126] FIGS. 26A-26B show that MLH1dn reduced pegRNA scaffold integration. Scaffold integration events at these sites occur through a double-strand break (DSB) intermediate.

[0127] FIG. 27 shows that MLH1dn does not promote substantial PE off-target editing. Small increases in off-target (OT) editing were observed at the HEK4 off-target site 3.

[0128] FIGS. 28A-28B show that MLH1dn does not induce detectable microsatellite instability at biomarker loci. MMR inhibition is known to cause shortening of homopolymer microsatellite regions.

[0129] FIG. 29 shows that MLH1dn offers a method to increase prime editing efficiency at sites without good ngRNAs, such as HEK4.

[0130] FIG. 30 shows that MLH1dn improves PE at disease sites.

[0131] FIG. 31 shows that MLH1dn enhances installation of the protective APOE Christchurch allele in mouse astrocytes. A 50% boost in editing efficiency and a large reduction in indels is shown.

[0132] FIG. 32 shows that HEK293T cells are MMR-compromised. The MLH1 promoter is hypermethylated in HEF293T, resulting in lower MLH1 expression.

[0133] FIGS. 33A-33B show that MLH1dn enhances prime editing in HeLa cells. FIG. 33A shows prime editing with PE2. FIG. 33B shows prime editing with PE3.

[0134] FIGS. 34A-34B show that MLH1dn enhances prime editing in HeLa cells. FIG. 34A shows editing of PRNP +6 G to T. FIG. 34B shows editing of APOE +6 G to T and +10 C to A.

[0135] FIGS. 35A-35B show that MLH1dn has a larger effect in MMR competent cell lines like HeLa.

[0136] FIGS. 36A-36D show that MLH1dn improvements synergize with stabilized pegRNAs.

[0137] FIGS. 37A-37B show that contiguous substitutions are useful as another strategy for evading MMR.

[0138] FIG. 38 shows that MMR does not efficiently repair 3 or more contiguous substitutions. Contiguous substitutions therefore offer a method for circumventing MMR and boosting PE efficiency.

[0139] FIGS. 39A-39C show that MLH1neg improves PE in HeLa cells.

[0140] FIGS. 40A-40G show that pooled Repair-seq CRISPRi screens reveal genetic determinants of substitution on prime editing outcomes. FIG. 40A shows that prime editing with the PE2 system is mediated by the PE2 enzyme (Streptococcus pyogenes Cas9 (SpCas9) H840A nickase fused to a reverse transcriptase) and a prime editing guide RNA (pegRNA). The PE3 system uses an additional single guide RNA (sgRNA) to nick the non-edited strand and yield higher editing efficiency. PBS, primer binding site. RT template, reverse transcription template. FIG. 40B provides an overview of prime editing Repair-seq CRISPRi screens. A library of CRISPRi sgRNAs and a pre-validated prime edit site are transduced into CRISPRi cell lines and transfected with prime editors targeting the edit site. CRISPRi sgRNA identities and prime edited sites are amplified together from genomic DNA and paired-end sequenced together to link each genetic perturbation with editing outcome. SaCas9, Staphylococcus aureus Cas9. FIG. 40C shows the effect of each CRISPRi sgRNA on the percentage of sequencing reads reporting the intended G⋅C-to-C⋅G prime edit at the targeted edit site in pooled CRISPRi screens. Each value depicts all sequencing reads carrying the same CRISPRi sgRNA. FIG. 40D shows the effect of CRISPRi sgRNAs on editing efficiency in all screen conditions. Black dots represent individual non-targeting sgRNAs, black lines show the mean of all non-targeting sgRNAs, and gray shading represents kernel density estimates of the distributions of all sgRNAs. FIGS. 40E-40G show comparisons of gene-level effects of CRISPRi targeting on the intended G⋅C-to-C⋅G prime edit across different screen conditions. (FIG. 40E) K562 PE2 vs. HeLa PE2. (FIG. 40F) K562 PE3+50 vs. HeLa PE3+50. (FIG. 40G) K562 PE2 vs. K562 PE3+50. The effect of each gene is calculated as the average log 2 fold change in frequency from non-targeting sgRNAs for the two most extreme sgRNAs targeting the gene. Plotted quantities are the mean of n=2 independent biological replicates for each cell type, with bars showing the range of values spanned by the replicates. Black dots represent 20 random sets of three non-targeting sgRNAs.

[0141] FIGS. 41A-41J show genetic modulators of unintended prime editing outcomes. FIGS. 41A-41D show representative examples of four categories of unintended prime editing outcomes observed in CRISPRi screens. In each panel, the black bar depicts the sequence of an editing outcome, the blue bar depicts genomic sequence around the targeted editing site, and the orange bar depicts the pegRNA sequence. Blue and orange lines between the editing outcome and the genome or pegRNA depict local alignments between the outcome sequence and the relevant reference sequence. Mismatches in alignments are marked by X's, and insertions are marked by downward dimples. The location of the programmed edit is marked by a grey box. Red and cyan rectangles on the genome mark SaCas9 protospacers and PAMs, and black vertical lines mark the locations of SaCas9 nick sites. Orange, beige, grey, and red rectangles on the pegRNA mark the primer binding site (PBS), reverse transcription template (RTT), scaffold, and spacer, respectively. FIGS. 41E-41F provide a summary of editing outcome categories observed in PE2 screens (FIG. 41E) and in PE3+50 screens (FIG. 41F) in K562 cells. Plotted quantities are the mean±SD of all sgRNAs for each indicated gene (60 non-targeting sgRNAs, three sgRNAs per targeted gene), averaged across n=2 independent biological replicates. FIGS. 41G-41H show a comparison of the effects of knockdown of all genes targeted in CRISPRi screens on the frequency of joining of reverse transcribed sequence at unintended locations (FIG. 41G) or the frequency of deletions (FIG. 41H) from PE3+50. The effect of each gene is calculated as the average log 2 fold change in frequency from non-targeting sgRNAs for the two most extreme sgRNAs targeting the gene. Plotted quantities are the mean of n=2 independent biological replicates for each cell type, with bars showing the range of values spanned by the replicates. Black dots represent 20 random sets of three non-targeting sgRNAs. FIG. 41I shows the frequency of deletion as a function of genomic position relative to programmed PE3+50 nicks (dashed vertical lines) in K562 screen replicate I across all reads for indicated sets of CRISPRi sgRNAs (black line: 60 non-targeting sgRNAs; orange and green lines: three sgRNAs targeting each of MSH2, MSH6, MLH1, and PMS2) (top). Log 2 fold change in frequency of deletion as a function of genomic position from MSH2. MSH6, MLH1, and PMS2 sgRNAs compared to non-targeting sgRNAs (bottom). FIG. 41 J shows the effect of gene knockdowns on the fraction of all observed deletions that remove sequence at least 25-nt outside of programmed PE3+50 nicks in K562 screens. Each dot represents all reads for all sgRNAs targeting each gene. Black dots represent 20 sets of three random non-targeting sgRNAs.

[0142] FIGS. 42A-42D show a model for mismatch repair of prime editing intermediates. FIG. 42A shows a model for DNA mismatch repair (MMR) of PE2 intermediates. MMR excises and replaces the nicked strand during repair of the prime editor-generated heteroduplex substrate. Infrequent ligation of the nick before MMR recognition deprives the strand discrimination signal for MMR, resulting in un-biased resolution of the heteroduplex. FIG. 42B shows a model for MMR of PE3 intermediates. PE3 installs an additional nick on the non-edited strand that can direct MMR to replace the non-edited strand. Ligation of the edited strand nick leaves only the complementary-strand nick to signal repair by MMR, resulting in the desired prime editing outcome. FIG. 42C shows prime editing efficiencies of PE2 and PE3 prime editors at endogenous sites (HEK3, EMX1, and RUNX1) in HEK293T cells pre-treated with knockdown siRNAs against MSH2, MSH6, MLH1, or PMS2 transcripts. Cells were pre-transfected with siRNAs 3 days prior to transfection with prime editor components and siRNAs. Genomic DNA was harvested 3 days following transfection with prime editors and additional siRNA, then sequenced. Bars represent the mean of n=3 independent biological replicates. FIG. 42D shows prime editing efficiencies in HAP1 ΔMSH2 and HAP1 ΔMLH1 cells (mean of n=3 independent biological replicates). A, gene knockout.

[0143] FIGS. 43A-43F show that engineered dominant negative MMR proteins (dominant negative variants of MSH2, MSH6, PMS2, and MLH1) enhance prime editing. FIG. 43A shows editing improvement at HEK2, EMX1, and RUNX1 sites by co-expression of PE2 in trans with human MMR proteins or dominant negative variants in HEK293T cells. MMR proteins include MSH2, MSH6, PMS2, and MLH1. Dominant negative variants are designated as MSH2 K675R, MSH6 K1140R, PMS2 E41A, PMS2 E705K, MLH1 E34A, and MLH1 Δ756. All values from n=3 independent biological replicates are shown. FIG. 43B shows functional annotation of the 756-aa human MLH1 protein, including an ATPase domain, MSH2 interaction domain, NLS domain, PMS2 dimerization domain, and an endonuclease domain. FIG. 43C shows editing enhancement of MLH1 variants co-expressed with PE2 in HEK293T cells at HEK3, EMX1, and RUNX1 sites. Red boxes indicate mutations that inactivate MLH1 ATPase or endonuclease function. MLH1dn, MLH1 Δ754-756. MLH1NTD-NLS, codon-optimized MLH1 1-335-NLSSV40. All values from n=3 independent biological replicates are shown. FIG. 43D shows a comparison of the top three dominant negative MLH1 variants at additional prime edits. All values from n=3 independent biological replicates are shown. FIG. 43E shows prime editing with PE2 and MLH1 dn in trans, PE2 and MLH1^{NTD}-NLS in trans, and PE2-P2A-MLH1dn (human codon optimized) in HEK293T cells. Bars represent the mean of n=3 independent biological replicates. FIG. 43F compares the structure of PE2, PE3, PE4, and PE5. In particular, the PE4 editing system consists of a prime editor enzyme (nickase Cas9-RT fusion), MLH1dn, and pegRNA. The PE5 editing system consists of a prime editor enzyme, MLH1dn, pegRNA, and second-strand nicking sgRNA. FIG. 43G shows editing efficiencies of PE2, PE3, PE4, and PE5 systems in HEK293T cells. Bars represent the mean of n=3 independent biological replicates).

[0144] FIGS. 44A-44G show the characterization of PE4 and PE5 across diverse prime editing classes and cell types. FIG. 44A provides a summary of prime editing enhancement by PE4 and PE5 compared to PE2 and PE3 for 84 single-base substitution edits (seven for each substitution type) across seven endogenous sites in HEK293T cells. The grand mean±SD of all individual values of n=3 independent biological replicates are shown. FIG. 44B shows installation of single base mutations at the FANCF locus with PE2, PE3, PE4, and PE5 in HEK293T cells. Bars represent the mean of n=3 independent biological replicates. FIG. 44C shows that PE4 improves the 1- and 3-bp insertion and deletion prime edits compared to PE2 in HEK293T cells. Bars represent the mean of n=3 independent biological replicates. FIG. 44D shows PE4 editing enhancement over PE2 across 33 different insertion and deletion prime edits. Bars represent the mean of all individual values of n=3 independent biological replicates. FIGS. 44F-44F provide a summary of PE2 and PE4 editing efficiencies for 35 different substitutions of 1 to 5 contiguous bases at five endogenous sites in HEK293T cells. Seven pegRNAs were tested for each number of contiguous bases altered. The mean±SD of all individual values of n=3 independent biological replicates are shown. FIGS. 44G-44H show that installation of additional silent or benign mutations near the intended edit can increase editing efficiency by generating a heteroduplex substrate that evades MMR. The PAM sequence (NGG) for each target is underlined. The amino acid sequence of the targeted gene is centered above each DNA codon. Values represent the mean±SD of n=3 independent biological replicates. FIG. 44I shows a comparison of prime editing enhancement in different cell types. PE4 and PE5 systems enhance prime editing to a greater extent in MMR deficient cells (MMR−) than in MMR proficient cells (MMR+). The same set of 30 pegRNAs encoding single-base substitution edits were tested in HEK293T and HeLa cells. K562 and U2OS cells were edited with 10 pegRNAs that are a direct subset of the 30 pegRNAs tested in HEK293T and HeLa cells. The mean±SD of all individual values of sets of n=3 independent biological replicates are shown. P values were calculated using the Mann-Whitney U test. FIG. 44J shows prime editing with PE2, PE3, PE4, and PE5 in HeLa, K562, and U2OS cells. Bars represent the mean of n=3 independent biological replicates).

[0145] FIGS. 45A-45H show the effect of dominant negative MLH1 on prime editing product purity and off-targeting. FIG. 45A shows that edit-encoding pegRNAs program a base change within the nascent 3′ DNA flap and generate a heteroduplex following flap interconversion. Non-editing pegRNAs template a 3′ DNA flap with perfect complementarity to the genomic target site. FIG. 45B shows the frequency of indels from PE3 or PE5 with four edit-encoding pegRNAs that program single base mutations or four non-editing pegRNAs. Short horizontal bars indicate the mean of all individual values of sets of n=3 independent biological replicates. FIG. 45C shows the ratio of indel frequency from PE5 over PE3 with 4 edit-encoding pegRNAs that program single base mutations or four edit-encoding pegRNAs that program single base mutations or four non-editing pegRNAs. Short horizontal bars indicate the mean of all individual values of sets of n=3 independent biological replicates. FIG. 45D shows distribution of deletions at genomic target DNA formed by PE3 and PE5 using 12 substitution-encoding pegRNAs at endogenous DNMT1 and RNF2 loci in HEK293T cells. Dotted lines indicate position of pegRNA- and sgRNA-directed nicks. Data represent the mean±SD of n=3 independent biological replicates. FIG. 45E shows PE5/PE3 ratio of frequency of deletions that remove sequence greater than 25-nt outside of pegRNA- and sgRNA-directed nicks in HEK293T cells. Each dot represents one of 84 total pegRNAs that program substitution edits at a combined seven loci (mean of n=3 independent biological replicates). FIG. 45F shows PE5/PE3 ratio of frequency of editing outcomes with unintended pegRNA scaffold sequence incorporation or unintended flap rejoining in HEK293T cells. Each dot represents one of 84 total pegRNAs that program substitution edits at a combined seven loci (mean of n=3 independent biological replicates). FIG. 45G shows off-target prime editing by PE2 and PE4 in HEK293T cells. Bars represent the mean of n=3 independent biological replicates). FIG. 45H shows high-throughput sequencing analysis of 17 sensitive microsatellite repeat loci used for clinical diagnosis of MMR deficiency. HAP1 and HeLa cells are MMR-proficient, and HCT116 cells have impaired MMR. HAP1 ΔMSH2 cells underwent 60 cell divisions following MSH2 knockout. HeLa cells were transiently transfected with PE2 or PE4 components and incubated for 3 days before sequencing, wt, wild-type. All values from n=2 independent biological replicates are shown.

[0146] FIGS. 46A-46F show that PEmax architecture with PE4 and PE5 editing systems enhances editing at disease-relevant gene targets and cell types. FIG. 46A shows a schematic of PE2 and PEmax editor architectures. bpNLSSV40, bipartite SV40 NLS nuclear localization signal. MMLV RT, Moloney Murine Leukemia Virus reverse transcriptase pentamutant; codon opt., human codon-optimized. FIG. 46B shows that engineered pegRNAs (epegRNAs) contain a 3′ RNA structural motif that improve prime editing performance. FIG. 46C shows prime editing efficiencies of PE4 and PE5 combined with PEmax architectures and epegRNAs. Seven single-base substitution edits targeting different loci were tested in HeLa and HEK293T cells. Fold changes indicate the average of fold increases from each edit tested. The mean±SD of all individual values of n=3 independent biological replicates are shown. FIG. 46D shows prime editing at therapeutically-relevant sites in wild-type HeLa and HEK293T cells. The HBB locus is edited at the E6 codon commonly mutated in patients with sickle cell disease (E6V). The CDKL5 edit is at a site for which the c.1412delA mutation causes CDKL5 deficiency disorder, epegRNAs were used for editing the HBB, PRNP, and CDKL5 loci. Bars represent the mean of n=3 independent biological replicates. FIG. 46E shows correction of CDKL5 c.1412delA via an A⋅T insertion and a silent G⋅C-to-A⋅T edit in iPSCs derived from a patient heterozygous for the allele. Editing efficiencies indicate the percentage of sequencing reads with c.1412delA correction out of editable alleles that carry the mutation. Indel frequencies reflect all sequencing reads that contain any indels. Bars represent the mean of n=3 independent biological replicates. FIG. 46F shows prime editing in primary human T cells. Bars represent the mean of n=3 independent biological replicates from different healthy T cell donors.

[0147] FIGS. 47A-47J show the design and results of Repair-seq screens for substitution prime editing outcomes. FIG. 47A shows optimization of a Staphylococcus aureus (Sa)-pegRNA for installation of a G⋅C-to-C⋅G edit within a lentivirally integrated HBB sequence using SaPE2 in HEK293T cells. PBS, primer-binding site. Data represent the mean of n=3 independent biological replicates. FIG. 47B shows the design of the prime editing Repair-seq lentiviral vector (pPC1000). In Repair-seq screens, a 453-bp region containing CRISPRi sgRNA sequence and prime editing outcome is amplified from genomic DNA for paired-end Illumina sequencing. The CRISPRi sgRNA is sequenced with a 44-nt Illumina forward read (R1), and the prime edited site (including +50 and −50 nick sites) is sequenced with a 263-nt Illumina reverse read (R2). Black triangles indicate positions of SaPE2-induced nicks programmed by Sa-pegRNA and Sa-sgRNAs. Sizes of all vector components are to scale. FIG. 47C shows a schematic of PE2, PE3+50, and PE3-50 prime editing configurations with SaPE2 protein (SaCas9 N580A fused to an engineered MMLV RT). FIG. 47D shows validation of intended G⋅C-to-C⋅G editing at the lentivirally-integrated Repair-seq edit site in HeLa cells expressing dCas9-BFP-KRAB cells. Bars represent the mean of n=2 independent biological replicates. FIG. 47E shows prime editing at the Repair-seq edit site with and without blasticidin selection in HeLa cells expressing dCas9-BFP-KRAB. SaPE2-P2A-BlastR prime editor was used for all conditions. Bars represent the mean of n=2. FIG. 47F shows functional annotation classes of the genes targeted by the pooled CRISPRi sgRNA library used in Repair-seq screens. FIGS. 47G-47J show that the knockdown of MSH2, MSH6, MLH1, and PMS2 increases the frequency of the intended +6 G⋅C-to-C⋅G prime edit in all Repair-seq screens. Dots represent reads from individual CRISPRi sgRNAs.

[0148] FIGS. 48A-48I show the genetic modulators of unintended prime editing outcomes. FIG. 48A shows an overview of PE3-50 outcomes in HeLa CRISPRi screens. TP53BP1 knockdown dramatically reduces formation of all unintended editing outcomes. FIG. 48B shows additional details of PE2 outcomes in K562 CRISPRi screens, supplementing FIG. 41H. FIG. 48C shows additional details of PE3+50 outcomes in K562 CRISPRi screens, supplementing information in FIG. 41G. FIGS. 48D-48I show comparisons of effects of gene knockdown on frequencies of indicated outcome categories in indicated screen conditions. Plotted quantities are the mean of the log 2 fold changes from non-targeting sgRNAs for the two most extreme sgRNAs per gene, averaged over n=2 independent biological replicates per condition. Error bars mark the range of values spanned by the replicates. Black dots represent 20 random sets of three non-targeting sgRNAs. FIG. 48D shows that MSH2, MLH1, and PMS2 knockdown produce larger fold changes in installation of additional edits than in intended edits in K562 PE2 screens. FIG. 48E shows unintended joining of reverse transcribed sequence in PE2 screens in K562 and HeLa cells are most increased by knockdown of Fanconi anemia genes (red) as well as a set of RAD51 homologs and other genes involved in homologous recombination (blue). FIG. 48F shows deletions in in PE2 screens in K562 and HeLa cells are most increased by a set of RAD51 homologs and other genes involved in homologous recombination (blue). FIG. 48G shows that in addition to MSH2, MLH1, and PMS2, HLTF knockdown produces larger fold changes in installation of additional edits than in intended edits in K562 PE3+50 screens. FIG. 48H shows that tandem duplications in HeLa and K562 PE3+50 screens are most decreased by knockdown of POLD and RFC subunits. FIG. 48I shows deletions in HeLa PE3+50 and PE3-50 screens have dramatically divergent genetic regulators, highlighting differences in the processing of the different overhang configurations.

[0149] FIGS. 49A-49F show validation of prime editing Repair-seq screen results. FIGS. 49A-49B show alignment of Sa-pegRNAs, their templated 3′ DNA flaps following SaPE2 reverse transcription, and the genomic target sequence (top). Compared to the Sa-pegRNA used in Repair-seq screens (FIG. 49A), an Sa-pegRNA with recoded scaffold sequence (FIG. 49B) templates an extended 3′ DNA flap with reduced homology with genomic target sequence. The recoded Sa-pegRNA contains 2 base pair changes that preserve base pairing interactions within the scaffold. Reverse transcription of the Sa-pegRNA scaffold can generate a misextended 3′ flap that is incorporated into the genome. Vertical lines depict base pairing. X's depict mismatches between the misextended reverse-transcribed 3′ flap and genomic sequence. FIGS. 49A-49B also show frequencies of editing outcome categories observed at the screen edit site from arrayed PE2 and PE3+50 experiments in HeLa CRISPRi cells (bottom). Prime editing with the Sa-pegRNA used in siteRepair-seq screens (FIG. 49A) or a recoded Sa-pegRNA (FIG. 49B) results in different frequencies of installation of unintended edits from nearly-matched scaffold. Plotted quantities are the mean±SD of n=4 independent biological replicates, for each cell line containing MSH2 or non-targeting CRISPRi sgRNAs. FIG. 49C shows the mechanism of DNA mismatch repair in humans. FIG. 49D shows mismatch repair of a prime editing heteroduplex intermediate could install additional non-programmed nicks from MutLα endonuclease activity. Excision from these non-programmed nicks and subsequent repair of the resulting intermediates may contribute to larger and more frequent indel byproducts observed from MMR activity. FIG. 49E shows the knockdown efficiency of siRNA treatment relative to a non-targeting siRNA control in HEK293T cells. Cells were transfected with siRNAs, incubated for 3 days, transfected with PE2, pegRNAs, and the same siRNAs, then incubated for another 3 days before relative RNA abundances were assayed by RT-qPCR. NT, non-targeting. Data represent the mean of n=3 independent biological replicates. Each dot represents the mean of n=3 technical replicates. FIG. 49F shows editing in HEK293T cells co-transfected with prime editor components and siRNAs. Cells were not pre-treated with siRNAs before transfection with prime editor. Bars represent the mean of n=3 independent biological replicates.

[0150] FIGS. 50A-50H show the development and characterization of dominant negative MMR proteins that enhance prime editing. FIG. 50A shows the prime editing efficiencies from MMR proteins or dominant negative variants expressed in trans with or fused directly to PE2 in HEK293T cells. 32aa linker, (SGGS)×2-XTEN-(SGGS)×2 (SEQ ID NO: 125) (SGGSSGGSSGSETPGTSESATPES SGGSSGGS (SEQ ID NO: 125) or structurally. [SGGS]-[SGGS]-[SGSETPGTSESATPES]-[SGGS]-[SGGS](SEQ ID NO: 125)), codon opt., human codon optimized. Data within the same graph originate from experiments performed at the same time. Data represent the mean±SD of n=3 independent biological replicates. FIG. 50B shows titration of MLH1dn plasmid and PE2 plasmid transfection doses in HEK293T cells. Maximum plasmid amounts tested were 200 ng PE2 and 100 ng MLH1dn. Data represent the mean±SD of n=3 independent biological replicates. FIG. 50C shows prime editing with MLH1dn co-expression in MMR-deficient HCT116 cells that contain a biallelic deletion in MLH1. Bars represent the mean of 3 replicates. FIG. 50D shows a comparison of prime editing with human MLH1dn (human codon-optimized) or mouse MLH1dn (mouse codon optimized) in human HEK293T cells. Bars represent the mean of n=3 independent biological replicates. FIG. 50E shows a comparison of prime editing with human MLH1dn (human codon optimized) or mouse MLH1dn (mouse codon optimized) in mouse N2A cells. Bars represent the mean of n=3 replicates. FIG. 50F shows that MLH1 knockout in clonal HeLa cell lines enhances prime editing efficiency to a greater extent than ML H1 co-expression in clonal wild-type HeLa cells. A, knockout. Bars represent the mean of n=3 or 4 independent biological replicates. FIG. 50G shows editing at the FANCF locus with PE3b and PE5b (complementary-strand nick that is specific for the edited sequence) in HEK293T cells. PE5b, PE3b editing system with MLH1dn co-expression. Bars represent the mean of n=3 independent biological replicates. FIG. 50H shows editing at the HEK2 locus with complementary-strand nicks in HEK293T cells. “None” indicates the lack of a nick, which denotes a PE2 or PE4 editing strategy. Bars represent the mean of n=3 independent biological replicates.

[0151] FIGS. 51A-51J show the characterization of PE4 and PE5 across diverse prime edit classes and cell types. FIG. 51A shows a comparison of PE2, PE3, PE4, and PE5 for 84 single-base substitution prime edits across seven endogenous sites in HEK293T cells. Bars represent the mean of n=3 independent biological replicates). FIG. 51B provides a summary of PE4 enhancement in editing efficiency over PE2 for 84 single-base substitution edits across seven endogenous sites in HEK293T cells. PE4/PE2 fold improvements may be lower for PAM edits due to the high basal editing efficiency for PAM edits or the high representation of G⋅C-to-C⋅G edits (five out of 15 in this category). Data represent the mean±SD of n=3 independent biological replicates. FIG. 51C shows the efficiencies of single-base substitution prime edits that alter the PAM (+5 G and +6 G bases) of prime editing target protospacers in HEK293T cells. Four G⋅C-to-A⋅T, five G⋅C-to-C⋅G, and six G⋅C-to-T⋅A PAM edits across a combined seven endogenous sites are shown. The mean of all individual values of n=3 independent biological replicates are shown. FIG. 51D shows the effect of siRNA knockdown of MMR genes on G⋅C-to-C⋅G editing at the RNF2 locus in HEK293T cells. Bars represent the mean of n=3 independent biological replicates. FIG. 51E shows the effect of MMR gene knockout on G⋅C-to-C⋅G editing at the RNF2 locus in HAP1 cells. Δ, gene knockout. Bars represent the mean of n=3 independent biological replicates. FIG. 51F shows prime editing at the integrated screen edit site with CRISPRi knockdown in HeLa CRISPRi cells. PE2 indicates editing with SaPE2 protein and Sa-pegRNA. PE3+50 indicates editing with SaPE2 protein, Sa-pegRNA, and Sa-sgRNA that programs a +50 complementary-strand nick. Bars represent the mean of n=5 independent biological replicates. FIG. 51G provides a summary of PE5 enhancement in editing efficiency over PE3 for 84 single-base substitution edits in HEK293T cells. The grand mean±SD of all individual values of n=3 independent biological replicates are shown. FIG. 51H shows PE4 enhancement in editing efficiency over PE2 across a range of insertion and deletion prime edit lengths in HEK293T cells. A total of 33 different prime edits at a combined three endogenous loci are shown. The mean of all individual values of n=3 independent biological replicates are shown. FIG. 51I shows that PE5 improves editing efficiency and reduces indel byproducts compared to PE3 across small insertion and deletion prime edits in HEK293T cells. FIG. 51J shows PE2 and PE4 editing efficiencies at 33 different insertion and deletion prime edits across a combined three endogenous loci. Bars represent the mean of all individual values of n=3 independent biological replicates.

[0152] FIGS. 52A-52C show characterization of PE4 and PE5 systems and improved prime editing efficiency with additional silent mutations. FIG. 52A shows substitutions of contiguous bases with PE2 and PE4 in HEK293T cells. The top sequence indicates the original, unedited genomic sequence. Numbers denote the position of the edited nucleotide relative to the PE2 nick site. Nucleotides within the SpCas9 PAM sequence (NGG) are underlined. Sequences of the intended edited product are shown below, with edited nucleotides marked in red. Bars represent the mean of n=3 independent biological replicates. FIG. 52B shows that installation of additional silent mutations can increase prime editing efficiency by evading MMR. PE4/PE2 fold-change in editing frequency reflects the extent to which MMR activity impedes the indicated prime edit. Edited nucleotides that make the indicated coding mutation are marked in red, and edited nucleotides that make silent mutations are marked in green. Data represent the mean±SD of n=3 independent biological replicates. FIG. 52C shows installation of 22 single-base substitution prime edits across seven endogenous sites in HeLa cells with PE2, PE3, PE4, and PE5. Bars represent the mean of n=3 independent biological replicates.

[0153] FIGS. 53A-53G show the effect of dominant negative MLH1 on prime editing product purity and off-targeting. FIG. 53A shows the frequency of indels in HEK293T cells treated with pegRNAs, nicking sgRNAs, and PE2 enzyme, RT-impaired PE2 (PE2-dRT), or nickase Cas9 (SpCas9 H840A), with and without MLH1dn. Non-editing pegRNAs encode a 3′ DNA flap with perfect homology to the genomic target. Bars represent the mean of n=3 independent biological replicates. FIG. 53B shows the distribution of deletion outcomes from PE3 and PE5 at endogenous loci in HEK293T cells. 12 different pegRNAs that program single-base substitutions were tested at each indicated locus. Dotted lines indicate position of pegRNA- and sgRNA-directed nicks. Data represent the mean±SD of n=3 independent biological replicates. FIG. 53C shows the distribution of deletion outcomes from PE3 and PE5 with an edit-encoding and non-editing pegRNA in HEK293T cells. The non-editing pegRNA templates a 3′ DNA flap with perfect complementarity to the genomic target sequence. Data represent the mean±SD of n=3 independent biological replicates. FIG. 53D shows the frequency of all prime editing outcomes with unintended pegRNA scaffold sequence incorporation or unintended flap rejoining in HEK293T cells. 12 pegRNAs each programming a different single-base substitution were tested at each of the seven indicated loci. Each dot represents an individual pegRNA at the indicated loci (mean of n=3 independent biological replicates). FIG. 53E shows the off-target prime editing by PE2 and PE4 in HEK293T cells (mean of n=3 independent biological replicates). FIG. 53F shows the distribution and cumulative distribution of microsatellite repeat lengths in the indicated cell types and treatments. HAP1 and HeLa cells are MMR-proficient, and HCT116 cells have impaired MMR. HAP1 ΔMSH2 cells underwent 60 cell divisions following knockout of MSH2. HeLa cells were transiently transfected with PE2 or PE4 components and grown for a following 3 days before sequencing, wt, wild-type. All values from n=2 independent biological replicates are shown. FIG. 53G shows prime editing at the on-target locus in HeLa cells transfected with PE2 or PE4 components. Bars represent the mean of n=2 independent biological replicates. Microsatellite lengths were assayed from genomic DNA taken from these PE2 and PE4-treated HeLa cells.

[0154] FIGS. 54A-54F show that use of PEmax architecture with PE4 and PE5 editing systems enhances editing at disease-relevant gene targets and cell types. FIG. 54A shows a schematic of PE2 and PEmax editor architectures. bpNLS^{SV40}, bipartite SV40 NLS. MMLV RT, Moloney Murine Leukemia Virus reverse transcriptase pentamutant. GS codon, Genscript human codon optimized. FIG. 54B shows engineered pegRNAs (epegRNAs) containing a 3′ RNA structural motif that improve prime editing performance. FIG. 54C shows prime editing efficiencies of PE4 and PE5 combined with PEmax architectures and epegRNAs. Seven single-base substitution edits targeting different loci were tested in HeLa and HEK293T cells. Fold changes indicate the average of fold increases from each edit tested. The mean±SD of all individual values of n=3 independent biological replicates are shown. FIG. 54D shows prime editing at therapeutically-relevant sites in wild-type HeLa and HEK293T cells. The HBB locus is edited at the E6 codon commonly mutated in patients with sickle cell disease (E6V). The CDKL5 edit is at a site for which the c.1412delA mutation causes CDKL5 deficiency disorder. epegRNAs were used for editing the HBB, PRNP, and CDKL5 loci. Bars represent the mean of n=3 independent biological replicates. FIG. 54E shows the correction of CDKL5 c.1412delA via an A⋅T insertion and a silent G⋅C-to-A⋅T edit in iPSCs derived from a patient heterozygous for the allele. Editing efficiencies indicate the percentage of sequencing reads with c.1412delA correction out of editable alleles that carry the mutation. Indel frequencies reflect all sequencing reads that contain any indels. Bars represent the mean of n=3 independent biological replicates. FIG. 54F shows prime editing in primary T cells. Bars represent the mean of n=3 independent biological replicates from different healthy T cell donors.

[0155] FIGS. 55A-55B show the development of PEmax and application of PE4 and PE5 to primary cell types. FIGS. 55A-55B show screening of prime editor variants to maximize editing efficiency in HeLa cells. All prime editor architectures carry a Cas9 H840A mutation to prevent nicking of the complementary DNA strand at the target protospacer. *NLSSV40 contains a 1-aa deletion outside the PKKKRKV (SEQ ID NO: 132) NLSSV40 consensus sequence. All individual values of n=3 independent biological replicates are shown.

[0156] FIGS. 56A-56G show development of PEmax and application of PE4 and PE5 to primary cell types. FIG. 56A shows a screen of prime editor variants for improved editing efficiency with the PE3 system in HeLa cells. All prime editor architectures carry a SpCas9 H840A mutation to prevent nicking of the complementary DNA strand at the target protospacer. NLSSV40 indicates the bipartite SV40 NLS. *NLSSV40 contains a 1-aa deletion outside the PKKKRKV (SEQ ID NO: 132) NLSSV40 consensus sequence. All individual values of n=3 independent biological replicates are shown. FIG. 56B shows the architecture of the original PE2 editor (Anzalone et al., 2019), PE2* (Liu et al., 2021). CM P-PE-V1 (Park et al., 2021), and prime editor variants developed in this work (PEmax, CMP-PEmax). HN1, HMGN1; H1G, histone H1 central globular domain; codon opt., human codon optimized. FIG. 56C shows that PEmax outperforms other prime editor architectures with the PE3 system in HeLa cells. Bars represent the mean of n=3 independent biological replicates. FIG. 56D shows fold-change in editing efficiency of prime editor architectures compared to PE2 with the PE3 system in HeLa cells. The mean±SD of all individual values of n=3 independent biological replicates are shown. FIG. 56E shows the intended editing and indel frequencies from PE4, PE4max (PE4 editing system with PEmax architecture), PE5, and PE5max (PE5 editing system with PEmax architecture) in HeLa and HEK293T cells. Seven substitution prime edits targeting different endogenous loci were tested for each condition. The mean±SD of all individual values of n=3 independent biological replicates are shown. FIG. 56F shows the correction of CDKL5 c.1412delA via an A⋅T insertion and a G⋅C-to-A⋅T edit in iPSCs derived from a patient heterozygous for the disease allele. Editing efficiencies indicate the percentage of sequencing reads with c.1412delA correction out of editable alleles that carry the mutation. Indel frequencies reflect all sequencing reads that contain any indels that do not map to the c.1412delA allele or wild-type sequence. 1 μg of PE2 mRNA was used in all conditions shown. Bars represent the mean of n=3 independent biological replicates. FIG. 56G shows prime editing in primary T cells. Bars represent the mean of n=3 independent replicates from different T cell donors.

[0157] FIGS. 57A-57B show that the recoded pegRNA scaffold reduces unintended outcomes from scaffold sequence incorporation. FIG. 57A shows an alignment of the prime editing Repair-seq target site and SaPE2-generated 3′ DNA flaps templated by (top) the Sa-pegRNA used in Repair-seq screens, or (bottom) an Sa-pegRNA with a recoded scaffold sequence. 3′ flap sequences are aligned with the templated region of the Sa-pegRNA shown above (RT template or scaffold). Red indicates position of the intended +6 G⋅C to C⋅G edit programmed by both Sa-pegRNAs. Blue indicates positions at which the genomic target sequence does not align with the 3′ flap sequence templated by the Sa-pegRNA scaffold. Unintended edits from incorporation of a 3′ flap containing a reverse transcribed Sa-pegRNA scaffold sequence may occur at these blue-indicated nucleotides. FIG. 57B shows a summary of editing outcome categories observed in PE2 and PE3+50 experiments in HeLa CRISPRi cells. Screen pegRNA indicates the Sa-pegRNA used in prime editing Repair-seq screens. Sa-pegRNA with recoded scaffold (sequence shown in FIG. 54A) avoids sequence homology with the Repair-seq edit site. Plotted quantities are the mean±SD of one CRISPRi sgRNA for each indicated target (MSH2 and non-targeting), averaged across n=4 independent biological replicates.

[0158] FIG. 58 shows a comparison of PE3max (PE3 editing system with PEmax protein) and PE3 (PE3 editing system with PE2 protein) in HeLa cells (mean of n=3 independent biological replicates).

[0159] FIG. 59 shows that PE improvement with MLH1dn depends on prime edit size. MMR most efficiently repairs substitutions and insertion and deletion errors of fewer than or equal to approximately 13 bp in length.

[0160] FIG. 60 shows that PE4 and epegRNAs enable prime editing with a single pegRNA integrant.

[0161] FIG. 61 shows that PE5 improves installation of the protective Christchurch allele in an APOE4 mouse astrocyte model.

[0162] FIGS. 62A-62C show that inhibiting p53 enhances the efficiency and precision of PE3 prime editing. This is particularly true when the nicking sgRNA makes a nick upstream (− side) of the pegRNA-directed nick. Each point on the graphs represents an individual CRISPRi gene knockdown in the Repair-seq screens. The axes depict log 2 fold changes compared to control. Knocking down TP53BP1 (p53 gene) increases intended editing (x-axis) and decreases three types of unintended editing (y-axes), including joining of the reverse transcribed sequence at unintended locations (FIG. 62A), unintended deletions (FIG. 62B), and unintended tandem duplications (FIG. 62C).

[0163] FIG. 63 shows that a p53 inhibitor (i53) can enhance the efficiency and precision of PE3 prime editing. This is particularly true when the nicking sgRNA makes a nick upstream (− side) of the pegRNA-directed nick. Only the EMX1 site uses a nick on the “−” side. FIG. 64 represents various aspects of the disclosure, including the use of CRISPRi screens to reveal cellular genes—including mismatch repair genes—having an impact on prime editing outcomes, the use of engineered MLH1 of the mismatch repair (MMR) pathway to enhance the efficiency and precision of prime editing, and the demonstration that improved prime editing systems described herein (e.g., PE4 and PE5 systems, and PEmax editor) were shown to exhibit the same beneficial effects in many cell types.

[0164] FIG. 64 shows that CRISPRi screens reveal cellular determinants of prime genome editing, that engineered MLH1 protein enhances prime editing efficiency and precision, and that improved prime editing systems were characterized across edit and cell types.

[0165] FIG. 65 provides a schematic showing the optimization of PE2 protein.

[0166] FIG. 66 shows the fold change in the frequency of the intended edit using PE2 and various other PE constructs in HEK293T cells (low plasmid dose) at a range of gene targets (HEK3, EMX1, RNF2, FANCF, FUNX1, DNMT1. VEGFA, HEK4, PRNP, APOE, CXCR4, HEK3).

[0167] FIG. 67 shows the fold change in the frequency of the intended edit using PE3 and various prime editor constructs in HeLa cells at a range of gene targets (HEK3, FANCF, RUNX1, VEGFA).

[0168] FIG. 68 shows a comparison of prime editing in HEK293T vs. HeLa editing using various PE constructs.

[0169] FIG. 69 shows NLS architecture optimization of PE3 in HeLa cells.

[0170] FIG. 70 provides a schematic showing the final PEmax construct, which corresponds to SEQ ID NO: 99.

[0171] FIG. 71 shows that PEmax increases indels in addition to the intended edit.

### DEFINITIONS

[0172] Unless defined otherwise, all technical and scientific terms used herein have the meaning commonly understood by a person skilled in the art to which this invention belongs. The following references provide one of skill with a general definition of many of the terms used in this invention: Singleton et al., Dictionary of Microbiology and Molecular Biology (2nd ed. 1994); The Cambridge Dictionary of Science and Technology (Walker ed., 1988); The Glossary of Genetics, 5th Ed., R. Rieger et al. (eds.), Springer Verlag (1991); and Hale & Marham, The Harper Collins Dictionary of Biology (1991). As used herein, the following terms have the meanings ascribed to them unless specified otherwise.

### Cas9

[0173] The term “Cas9” or “Cas9 nuclease” refers to an RNA-guided nuclease comprising a Cas9 domain, or a fragment thereof (e.g., a protein comprising an active or inactive DNA cleavage domain of Cas9, and/or the gRNA binding domain of Cas9). A “Cas9 domain” as used herein, is a protein fragment comprising an active or inactive cleavage domain of Cas9 and/or the gRNA binding domain of Cas9. A “Cas9 protein” is a full length Cas9 protein. A Cas9 nuclease is also referred to sometimes as a casn1 nuclease or a CRISPR (Clustered Regularly Interspaced Short Palindromic Repeat)—associated nuclease. CRISPR is an adaptive immune system that provides protection against mobile genetic elements (viruses, transposable elements, and conjugative plasmids). CRISPR clusters contain spacers, sequences complementary to antecedent mobile elements, and target invading nucleic acids. CRISPR clusters are transcribed and processed into CRISPR RNA (crRNA). In type II CRISPR systems, correct processing of pre-crRNA requires a trans-encoded small RNA (tracrRNA), endogenous ribonuclease 3 (rnc), and a Cas9 domain. The tracrRNA serves as a guide for ribonuclease 3-aided processing of pre-crRNA. Subsequently, Cas9/crRNA/tracrRNA endonucleolytically cleaves a linear or circular dsDNA target complementary to the spacer. The target strand not complementary to crRNA is first cut endonucleolytically, then trimmed 3′-5′ exonucleolytically. In nature, DNA-binding and cleavage typically requires protein and both RNAs. However, single guide RNAs (“sgRNA”, or simply “gNRA”) can be engineered to incorporate aspects of both the crRNA and tracrRNA into a single RNA species. See, e.g., Jinek M., Chylinski K., Fonfara I., Hauer M., Doudna J. A., Charpentier E. Science 337:816-821(2012), the entire contents of which are hereby incorporated by reference, Cas9 recognizes a short motif in the CRISPR repeat sequences (the PAM or protospacer adjacent motif) to help distinguish self versus non-self, Cas9 nuclease sequences and structures are well known to those of skill in the art (see, e.g., “Complete genome sequence of an M1 strain of Streptococcus pyogenes.” Ferretti et al., J. J., McShan W. M., Ajdic D. J., Savic D. J., Savic G., Lyon K., Primeaux C., Sezate S., Suvorov A. N., Kenton S., Lai H. S., Lin S. P., Qian Y., Jia H. G., Najar F. Z., Ren Q., Zhu H., Song L., White J., Yuan X., Clifton S. W., Roe B. A., McLaughlin R. E., Proc. Natl. Acad. Sci. U.S.A. 98:4658-4663(2001); “CRISPR RNA maturation by trans-encoded small RNA and host factor RNase III.” Deltcheva E., Chylinski K., Sharma C. M., Gonzales K., Chao Y., Pirzada Z. A., Eckert M. R., Vogel J., Charpentier E., Nature 471:602-607(2011); and “A programmable dual-RNA-guided DNA endonuclease in adaptive bacterial immunity.” Jinek M., Chylinski K., Fonfara I., Hauer M., Doudna J. A., Charpentier E. Science 337:816-821(2012), the entire contents of each of which are incorporated herein by reference), Cas9 orthologs have been described in various species, including, but not limited to, S. pyogenes and S. thermophilus. Additional suitable Cas9 nucleases and sequences will be apparent to those of skill in the art based on this disclosure, and such Cas9 nucleases and sequences include Cas9 sequences from the organisms and loci disclosed in Chylinski, Rhun, and Charpentier, “The tracrRNA and Cas9 families of type II CRISPR-Cas immunity systems” (2013) RNA Biology 10:5, 726-737; the entire contents of which are incorporated herein by reference. In some embodiments, a Cas9 nuclease comprises one or more mutations that partially impair or inactivate the DNA cleavage domain.

[0174] A nuclease-inactivated Cas9 domain may interchangeably be referred to as a “dCas9” protein (for nuclease-“dead” Cas9). Methods for generating a Cas9 domain (or a fragment thereof) having an inactive DNA cleavage domain are known (see, e.g., Jinek et al., Science, 337:816-821(2012); Qi et al., “Repurposing CRISPR as an RNA-Guided Platform for Sequence-Specific Control of Gene Expression” (2013) Cell. 28; 152(5):1173-83, the entire contents of each of which are incorporated herein by reference). For example, the DNA cleavage domain of Cas9 is known to include two subdomains, the HNH nuclease subdomain and the RuvC1 subdomain. The HNH subdomain cleaves the strand complementary to the gRNA, whereas the RuvC1 subdomain cleaves the non-complementary strand. Mutations within these subdomains can silence the nuclease activity of Cas9. For example, the mutations D10A and H840A completely inactivate the nuclease activity of S. pyogenes Cas9 (Jinek et al., Science. 337:816-821(2012); Qi et al., Cell. 28; 152(5):1173-83 (2013)). In some embodiments, proteins comprising fragments of Cas9 are provided. For example, in some embodiments, a protein comprises one of two Cas9 domains: (1) the gRNA binding domain of Cas9; or (2) the DNA cleavage domain of Cas9. In some embodiments, proteins comprising Cas9 or fragments thereof are referred to as “Cas9 variants.” A Cas9 variant shares homology to Cas9, or a fragment thereof. For example, a Cas9 variant is at least about 70% identical, at least about 80% identical, at least about 90% identical, at least about 95% identical, at least about 96% identical, at least about 97% identical, at least about 98% identical, at least about 99% identical, at least about 99.5% identical, at least about 99.8% identical, or at least about 99.9% identical to wild type Cas9 (e.g., SpCas9 of SEQ ID NO: 2). In some embodiments, the Cas9 variant may have 1, 2, 3, 4, 5, 6, 7, 8, 9, 10, 11, 12, 13, 14, 15, 16, 17, 18, 19, 20, 21, 22, 21, 24, 25, 26, 27, 28, 29, 30, 31, 32, 33, 34, 35, 36, 37, 38, 39, 40, 41, 42, 43, 44, 45, 46, 47, 48, 49, 50, or more amino acid changes compared to wild type Cas9 (e.g., SpCas9 of SEQ ID NO: 2). In some embodiments, the Cas9 variant comprises a fragment of SEQ ID NO: 2 Cas9 (e.g., a gRNA binding domain or a DNA-cleavage domain), such that the fragment is at least about 70% identical, at least about 80% identical, at least about 90% identical, at least about 95% identical, at least about 96% identical, at least about 97% identical, at least about 98% identical, at least about 99% identical, at least about 99.5% identical, or at least about 99.9% identical to the corresponding fragment of wild type Cas9 (e.g., SpCas9 of SEQ ID NO: 2). In some embodiments, the fragment is at least 30%, at least 35%, at least 40%, at least 45%, at least 50%, at least 55%, at least 60%, at least 65%, at least 70%, at least 75%, at least 80%, at least 85%, at least 90%, at least 95% identical, at least 96%, at least 97%, at least 98%, at least 99%, or at least 99.5% of the amino acid length of a corresponding wild type Cas9 (e.g., SpCas9 of SEQ ID NO: 2).

### Circular Permutant

[0175] As used herein, the term “circular permutant” refers to a protein or polypeptide (e.g., a Cas9) comprising a circular permutation, which is a change in the protein's structural configuration involving a change in the order of amino acids appearing in the protein's amino acid sequence. In other words, circular permutants are proteins that have altered N- and C-termini as compared to a wild-type counterpart, e.g., the wild-type C-terminal half of a protein becomes the new N-terminal half. Circular permutation (or CP) is essentially the topological rearrangement of a protein's primary sequence, connecting its N- and C-terminus, often with a peptide linker, while concurrently splitting its sequence at a different position to create new, adjacent N- and C-termini. The result is a protein structure with different connectivity, but which often can have the same overall similar three-dimensional (3D) shape, and possibly include improved or altered characteristics, including reduced proteolytic susceptibility, improved catalytic activity, altered substrate or ligand binding, and/or improved thermostability. Circular permutant proteins can occur in nature (e.g., concanavalin A and lectin). In addition, circular permutation can occur as a result of posttranslational modifications or may be engineered using recombinant techniques.

### Circularly Permuted Cas9

[0176] The term “circularly permuted Cas9” refers to any Cas9 protein, or variant thereof, that occurs as a circular permutant, whereby its N- and C-termini have been topically rearranged. Such circularly permuted Cas9 proteins (“CP-Cas9”), or variants thereof, retain the ability to bind DNA when complexed with a guide RNA (gRNA). See, Oakes et al., “Protein Engineering of Cas9 for enhanced function,” Methods Enzymol, 2014, 546: 491-511 and Oakes et al., “CRISPR-Cas9 Circular Permutants as Programmable Scaffolds for Genome Modification,” Cell, Jan. 10, 2019, 176: 254-267, each of which are incorporated herein by reference. The instant disclosure contemplates any previously known CP-Cas9 or use of a new CP-Cas9 so long as the resulting circularly permuted protein retains the ability to bind DNA when complexed with a guide RNA (gRNA). Exemplary CP-Cas9 proteins are SEQ ID NOs: 54-63.

### CRISPR

[0177] CRISPR is a family of DNA sequences (i.e., CRISPR clusters) in bacteria and archaea that represent snippets of prior infections by a virus that have invaded the prokaryote. The snippets of DNA are used by the prokaryotic cell to detect and destroy DNA from subsequent attacks by similar viruses and effectively compose, along with an array of CRISPR-associated proteins (including Cas9 and homologs thereof) and CRISPR-associated RNA, a prokaryotic immune defense system. In nature, CRISPR clusters are transcribed and processed into CRISPR RNA (crRNA). In certain types of CRISPR systems (e.g., type II CRISPR systems), correct processing of pre-crRNA requires a trans-encoded small RNA (tracrRNA), endogenous ribonuclease 3 (rnc) and a Cas9 protein. The tracrRNA serves as a guide for ribonuclease 3-aided processing of pre-crRNA. Subsequently, Cas9/crRNA/tracrRNA endonucleolytically cleaves a linear or circular dsDNA target complementary to the RNA. Specifically, the target strand not complementary to crRNA is first cut endonucleolytically, then trimmed 3′-5′ exonucleolytically. In nature, DNA-binding and cleavage typically requires protein and both RNAs. However, single guide RNAs (“sgRNA”, or simply “gNRA”) can be engineered so as to incorporate aspects of both the crRNA and tracrRNA into a single RNA species—the guide RNA. See, e.g., Jinek M., Chylinski K., Fonfara I., Hauer M., Doudna J. A., Charpentier E. Science 337:816-821(2012), the entire contents of which is hereby incorporated by reference, Cas9 recognizes a short motif in the CRISPR repeat sequences (the PAM or protospacer adjacent motif) to help distinguish self versus non-self. CRISPR biology, as well as Cas9 nuclease sequences and structures are well known to those of skill in the art (see, e.g., “Complete genome sequence of an M1 strain of Streptococcus pyogenes.” Ferretti et al., J. J., McShan W. M., Ajdic D. J., Savic D. J., Savic G., Lyon K., Primeaux C., Sezate S., Suvorov A. N., Kenton S., Lai H. S., Lin S. P., Qian Y., Jia H. G., Najar F. Z., Ren Q., Zhu H., Song L., White J., Yuan X., Clifton S. W., Roe B. A., McLaughlin R. E., Proc. Natl. Acad. Sci. U.S.A. 98:4658-4663(2001); “CRISPR RNA maturation by trans-encoded small RNA and host factor RNase III.” Deltcheva E., Chylinski K., Sharma C. M., Gonzales K., Chao Y., Pirzada Z. A., Eckert M. R., Vogel J., Charpentier E., Nature 471:602-607(2011); and “A programmable dual-RNA-guided DNA endonuclease in adaptive bacterial immunity.” Jinek M., Chylinski K., Fonfara I., Hauer M., Doudna J. A., Charpentier E. Science 337:816-821(2012), the entire contents of each of which are incorporated herein by reference). Cas9 orthologs have been described in various species, including, but not limited to, S. pyogenes and S. thermophilus. Additional suitable Cas9 nucleases and sequences will be apparent to those of skill in the art based on this disclosure, and such Cas9 nucleases and sequences include Cas9 sequences from the organisms and loci disclosed in Chylinski, Rhun, and Charpentier, “The tracrRNA and Cas9 families of type II CRISPR-Cas immunity systems” (2013) RNA Biology 10:5, 726-737; the entire contents of which are incorporated herein by reference.

[0178] In certain types of CRISPR systems (e.g., type II CRISPR systems), correct processing of pre-crRNA requires a trans-encoded small RNA (tracrRNA), endogenous ribonuclease 3 (rnc), and a Cas9 protein. The tracrRNA serves as a guide for ribonuclease 3-aided processing of pre-crRNA. Subsequently, Cas9/crRNA/tracrRNA endonucleolytically cleaves a linear or circular nucleic acid target complementary to the RNA. Specifically, the target strand not complementary to crRNA is first cut endonucleolytically, then trimmed 3′-5′ exonucleolytically. In nature, DNA-binding and cleavage typically requires protein and both RNAs. However, single guide RNAs (“sgRNA”, or simply “gRNA”) can be engineered to incorporate embodiments of both the crRNA and tracrRNA into a single RNA species—the guide RNA.

[0179] In general, a “CRISPR system” refers collectively to transcripts and other elements involved in the expression of or directing the activity of CRISPR-associated (“Cas”) genes, including sequences encoding a Cas gene, a tracr (trans-activating CRISPR) sequence (e.g. tracrRNA or an active partial tracrRNA), a tracr mate sequence (encompassing a “direct repeat” and a tracrRNA-processed partial direct repeat in the context of an endogenous CRISPR system), a guide sequence (also referred to as a “spacer” in the context of an endogenous CRISPR system), or other sequences and transcripts from a CRISPR locus. The tracrRNA of the system is complementary (fully or partially) to the tracr mate sequence present on the guide RNA.

### DNA Synthesis Template

[0180] As used herein, the term “DNA synthesis template” refers to the region or portion of the extension arm of a PEgRNA that is utilized as a template strand by a polymerase of a prime editor to encode a 3′ single-strand DNA flap that contains the desired edit and which then, through the mechanism of prime editing, replaces the corresponding endogenous strand of DNA at the target site. The extension arm, including the DNA synthesis template, may be comprised of DNA or RNA. In the case of RNA, the polymerase of the prime editor can be an RNA-dependent DNA polymerase (e.g., a reverse transcriptase). In the case of DNA, the polymerase of the prime editor can be a DNA-dependent DNA polymerase. In various embodiments the DNA synthesis template may comprise the “edit template” and the “homology arm”, and all or a portion of the optional 5′ end modifier region, e2. That is, depending on the nature of the e2 region (e.g., whether it includes a hairpin, toeloop, or stem/loop secondary structure), the polymerase may encode none, some, or all of the e2 region as well. Said another way, in the case of a 3′ extension arm, the DNA synthesis template can include the portion of the extension arm that spans from the 5′ end of the primer binding site (PBS) to 3′ end of the gRNA core that may operate as a template for the synthesis of a single-strand of DNA by a polymerase (e.g., a reverse transcriptase). In the case of a 5′ extension arm, the DNA synthesis template can include the portion of the extension arm that spans from the 5′ end of the PEgRNA molecule to the 3′ end of the edit template. In some embodiments, the DNA synthesis template excludes the primer binding site (PBS) of PEgRNAs either having a 3′ extension arm or a 5′ extension arm. Certain embodiments described here refer to an “an RT template,” which is inclusive of the edit template and the homology arm, i.e., the sequence of the PEgRNA extension arm which is actually used as a template during DNA synthesis. The term “RT template” is equivalent to the term “DNA synthesis template.” in certain embodiments, an RT template may be used to refer to a template polynucleotide for reverse transcription, e.g., in a prime editing system, complex, or method using a prime editor having a polymerase that is a reverse transcriptase. In some embodiments, a DNA synthesis template may be used to refer to a template polynucleotide for DNA polymerization, e.g., RNA-dependent DNA polymerization or DNA-dependent DNA polymerization, e.g., in a prime editing system, complex, or method using a prime editor having a polymerase that is an RNA-dependent DNA polymerase or a DNA-dependent DNA polymerase.

[0181] In some embodiments, the DNA synthesis template is a single-stranded portion of the PEgRNA that is 5′ of the PBS and comprises a region of complementarity to the PAM strand (i.e., the non-target strand or the edit strand), and comprises one or more nucleotide edits compared to the endogenous sequence of the double stranded target DNA. In some embodiments, the DNA synthesis template is complementary or substantially complementary to a sequence on the non-target strand that is downstream of a nick site, except for one or more non-complementary nucleotides at the intended nucleotide edit positions. In some embodiments, the DNA synthesis template is complementary or substantially complementary to a sequence on the non-target strand that is immediately downstream (i.e., directly downstream) of a nick site, except for one or more non-complementary nucleotides at the intended nucleotide edit positions. In some embodiments, one or more of the non-complementary nucleotides at the intended nucleotide edit positions are immediately downstream of a nick site. In some embodiments, the DNA synthesis template comprises one or more nucleotide edits relative to the double-stranded target DNA sequence. In some embodiments, the DNA synthesis template comprises one or more nucleotide edits relative to the non-target strand of the double-stranded target DNA sequence. For each PEgRNA described herein, a nick site is characteristic of the particular napDNAbp to which the gRNA core of the PEgRNA associates, and is characteristic of the particular PAM required for recognition and function of the napDNAbp. For example, for a PEgRNA that comprises a gRNA core that associates with a SpCas9, the nick site in the phosphodiester bond between bases three (“−3” position relative to the position 1 of the PAM sequence) and four (“−4” position relative to position 1 of the PAM sequence). In some embodiments, the DNA synthesis template and the primer binding site are immediately adjacent to each other. The terms “nucleotide edit”, “nucleotide change”, “desired nucleotide change”, and “desired nucleotide edit” are used interchangeably to refer to a specific nucleotide edit, e.g., a specific deletion of one or more nucleotides, a specific insertion of one or more nucleotides, a specific substitution (or multiple substitutions) of one or more nucleotides, or a combination thereof, at a specific position in a DNA synthesis template of a PEgRNA to be incorporated in a target DNA sequence. In some embodiments, the DNA synthesis template comprises more than one nucleotide edit relative to the double-stranded target DNA sequence. In such embodiments, each nucleotide edit is a specific nucleotide edit at a specific position in the DNA synthesis template, each nucleotide edit is at a different specific position relative to any of the other nucleotide edits in the DNA synthesis template, and each nucleotide edit is independently selected from a specific deletion of one or more nucleotides, a specific insertion of one or more nucleotides, a specific substitution (or multiple substitutions) of one or more nucleotides, or a combination thereof. A nucleotide edit may refer to the edit on the DNA synthesis template as compared to the sequence on the target strand of the target gene, or a nucleotide edit may refer to the edit encoded by the DNA synthesis template on the newly synthesized single stranded DNA that replaces the endogenous target DNA sequence on the non-target strand.

### Dominant Negative Variant

[0182] The terms “dominant negative variant” and “dominant negative mutant” refer to genes or gene products (e.g., proteins) that comprise a mutation that results in the gene product acting antagonistically to the wild-type gene product (i.e., inhibiting its activity). Dominant negative mutations generally result in an altered molecular function (often inactive). For example, the present disclosure provides dominant negative variants of MMR proteins that inhibit the activity of wild-type MMR proteins (e.g., the dominant negative MLH1 proteins described herein).

### Edit Template

[0183] The term “edit template” refers to a portion of the extension arm that encodes the desired edit in the single strand 3′ DNA flap that is synthesized by the polymerase, e.g., a DNA-dependent DNA polymerase, RNA-dependent DNA polymerase (e.g., a reverse transcriptase). Certain embodiments described here refer to “an RT template,” which refers to both the edit template and the homology arm together, i.e., the sequence of the PEgRNA extension arm which is actually used as a template during DNA synthesis. The term “RT edit template” is also equivalent to the term “DNA synthesis template,” but wherein the RT edit template reflects the use of a prime editor having a polymerase that is a reverse transcriptase, and wherein the DNA synthesis template reflects more broadly the use of a prime editor having any polymerase.

### Extension Arm

[0184] The term “extension arm” refers to a nucleotide sequence component of a PEgRNA which comprises a primer binding site and a DNA synthesis template (e.g., an edit template and a homology arm) for a polymerase (e.g., a reverse transcriptase). In some embodiments, the extension arm is located at the 3′ end of the guide RNA. In other embodiments, the extension arm is located at the 5′ end of the guide RNA. In some embodiments, the extension arm comprises a DNA synthesis template and a primer binding site. In some embodiments, the extension arm comprises the following components in a 5′ to 3′ direction: the DNA synthesis template and the primer binding site. In some embodiments, the extension arm also includes a homology arm. In various embodiments, the extension arm comprises the following components in a 5′ to 3′ direction: the homology arm, the edit template, and the primer binding site. Since polymerization activity of the reverse transcriptase is in the 5′ to 3′ direction, the preferred arrangement of the homology arm, edit template, and primer binding site is in the 5′ to 3′ direction such that the reverse transcriptase, once primed by an annealed primer sequence, polymerizes a single strand of DNA using the edit template as a complementary template strand.

[0185] The extension arm may also be described as comprising generally two regions: a primer binding site (PBS) and a DNA synthesis template, for instance. The primer binding site binds to the primer sequence that is formed from the endogenous DNA strand of the target site when it becomes nicked by the prime editor complex, thereby exposing a 3′ end on the endogenous nicked strand. As explained herein, the binding of the primer sequence to the primer binding site on the extension arm of the PEgRNA creates a duplex region with an exposed 3′ end (i.e., the 3′ of the primer sequence), which then provides a substrate for a polymerase to begin polymerizing a single strand of DNA from the exposed 3′ end along the length of the DNA synthesis template. The sequence of the single strand DNA product is the complement of the DNA synthesis template. Polymerization continues towards the 5′ of the DNA synthesis template (or extension arm) until polymerization terminates. Thus, the DNA synthesis template represents the portion of the extension arm that is encoded into a single strand DNA product (i.e., the 3′ single strand DNA flap containing the desired genetic edit information) by the polymerase of the prime editor complex and which ultimately replaces the corresponding endogenous DNA strand of the target site that sits immediately downstream of the PE-induced nick site. Without being bound by theory, polymerization of the DNA synthesis template continues towards the 5′ end of the extension arm until a termination event. Polymerization may terminate in a variety of ways, including, but not limited to (a) reaching a 5′ terminus of the PEgRNA (e.g., in the case of the 5′ extension arm wherein the DNA polymerase simply runs out of template), (b) reaching an impassable RNA secondary structure (e.g., hairpin or stem/loop), or (c) reaching a replication termination signal, e.g., a specific nucleotide sequence that blocks or inhibits the polymerase, or a nucleic acid topological signal, such as, supercoiled DNA or RNA.

### Fusion Protein

[0186] The term “fusion protein” as used herein refers to a hybrid polypeptide which comprises protein domains from at least two different proteins. One protein may be located at the amino-terminal (N-terminal) portion of the fusion protein or at the carboxy-terminal (C-terminal) protein thus forming an “amino-terminal fusion protein” or a “carboxy-terminal fusion protein,” respectively. A protein may comprise different domains, for example, a nucleic acid binding domain (e.g., the gRNA binding domain of Cas9 that directs the binding of the protein to a target site) and a nucleic acid cleavage domain or a catalytic domain of a nucleic-acid editing protein. Another example includes a Cas9 or equivalent thereof to a reverse transcriptase. Any of the proteins provided herein may be produced by any method known in the art. For example, the proteins provided herein may be produced via recombinant protein expression and purification, which is especially suited for fusion proteins comprising a peptide linker. Methods for recombinant protein expression and purification are well known, and include those described by Green and Sambrook, Molecular Cloning: A Laboratory Manual (4^{th} ed., Cold Spring Harbor Laboratory Press, Cold Spring Harbor, N.Y. (2012)), the entire contents of which are incorporated herein by reference.

Guide RNA (“gRNA”)

[0187] As used herein, the term “guide RNA” is a particular type of guide nucleic acid which is mostly commonly associated with a Cas protein of a CRISPR-Cas9 and which associates with Cas9, directing the Cas9 protein to a specific sequence in a DNA molecule that includes complementarity to the protospacer sequence of the guide RNA. However, this term also embraces the equivalent guide nucleic acid molecules that associate with Cas9 equivalents, homologs, orthologs, or paralogs, whether naturally occurring or non-naturally occurring (e.g., engineered or recombinant), and which otherwise program the Cas9 equivalent to localize to a specific target nucleotide sequence. The Cas9 equivalents may include other napDNAbp from any type of CRISPR system (e.g., type II, V, VI), including Cpf1 (a type-V CRISPR-Cas systems), C2c1 (a type V CRISPR-Cas system), C2c2 (a type VI CRISPR-Cas system) and C2c3 (a type V CRISPR-Cas system). Further Cas-equivalents are described in Makarova et al., “C2c2 is a single-component programmable RNA-guided RNA-targeting CRISPR effector,” Science 2016; 353(6299), the contents of which are incorporated herein by reference. Exemplary sequences are and structures of guide RNAs are provided herein. In addition, methods for designing appropriate guide RNA sequences are provided herein. As used herein, the “guide RNA” may also be referred to as a “traditional guide RNA” to contrast it with the modified forms of guide RNA termed “prime editing guide RNAs” (or “PEgRNAs”).

[0188] Guide RNAs or PEgRNAs may comprise various structural elements that include, but are not limited to:

[0189] Spacer sequence—the sequence in the guide RNA or PEgRNA (having about 20 nts in length) which binds to the protospacer in the target DNA.

[0190] gRNA core (or gRNA scaffold or backbone sequence)—refers to the sequence within the gRNA that is responsible for Cas9 binding, it does not include the 20 bp spacer/targeting sequence that is used to guide Cas9 to target DNA. In some embodiments, the gRNA core or scaffold comprises a sequence that comprises one or more nucleotide alterations compared to a naturally occurring CRISPR-Cas guide RNA scaffold, for example, a Cas9 guide RNA scaffold. In some embodiments, the sequence of the gRNA core is designed to comprise minimal or no sequence homology to the endogenous sequence of the target nucleic acid at the target site, thereby reducing unintended edits. For example, in some embodiments, one or more base pairs in the second stem loop of a Cas9 gRNA core may be “flipped” (e.g., the G-U base pair and the U-A base pair as exemplified in FIG. 49A) to reduce unintended edits. In some embodiments, the gRNA core comprises no more than 1%, 5%, 10%, 15%, 20%, 25%, or 30% sequence homology to the sequence of the double stranded target DNA that flanks 5, 10, 15, 20, 25, 30, 35, 40, 45, or 50 nucleotides upstream or downstream of the position of the one or more nucleotide edits

[0191] Extension arm—a single strand extension at the 3′ end or the 5′ end of the PEgRNA which comprises a primer binding site and a DNA synthesis template sequence that encodes via a polymerase (e.g., a reverse transcriptase) a single stranded DNA flap containing the genetic change of interest, which then integrates into the endogenous DNA by replacing the corresponding endogenous strand, thereby installing the desired genetic change.

[0192] Transcription terminator—the guide RNA or PEgRNA may comprise a transcriptional termination sequence at the 3′ of the molecule. In some embodiments, the PEgRNA comprises a transcriptional termination sequence between the DNA synthesis template and the gRNA core.

### Homology

[0193] The terms “homologous,” “homology,” or “percent homology” as used herein refer to the degree of sequence identity between an amino acid or polynucleotide sequence and a corresponding reference sequence. “Homology” can refer to polymeric sequences, e.g., polypeptide or DNA sequences that are similar. Homology can mean, for example, nucleic acid sequences with at least about: 50%, 55%, 60%, 65%, 70%, 75%, 80%, 81%, 82%, 83%, 84%, 85%, 86%, 87%, 88%, 89%, 90%, 91%, 92%, 93%, 94%, 95%, 96%, 97%, 98%, 99%, or 100% identity. In other embodiments, a “homologous sequence” of nucleic acid sequences may exhibit 93%, 95%, or 98% sequence identity to the reference nucleic acid sequence. For example, a “region of homology to a genomic region” can be a region of DNA that has a similar sequence to a given genomic region in the genome. A region of homology can be of any length that is sufficient to promote binding of a spacer or protospacer sequence to the genomic region. For example, the region of homology can comprise at least 5, 10, 11, 12, 13, 14, 15, 16, 17, 18, 19, 20, 21, 22, 23, 24, 25, 30, 35, 40, 45, 50, 55, 60, 65, 70, 75, 80, 85, 90, 95, 100, 200, 300, 400, 500, 600, 700, 800, 900, 1000, 1100, 1200, 1300, 1400, 1500, 1600, 1700, 1800, 1900, 2000, 2100, 2200, 2300, 2400, 2500, 2600, 2700, 2800, 2900, 3000, 3100, or more bases in length such that the region of homology has sufficient homology to undergo binding with the corresponding genomic region.

[0194] When a percentage of sequence homology or identity is specified, in the context of two nucleic acid sequences or two polypeptide sequences, the percentage of homology or identity generally refers to the alignment of two or more sequences across a portion of their length when compared and aligned for maximum correspondence. When a position in the compared sequence can be occupied by the same base or amino acid, then the molecules can be homologous at that position. Unless stated otherwise, sequence homology or identity is assessed over the specified length of the nucleic acid, polypeptide, or portion thereof. In some embodiments, the homology or identity is assessed over a functional portion or a specified portion of the length.

[0195] Alignment of sequences for assessment of sequence homology can be conducted by algorithms known in the art, such as the Basic Local Alignment Search Tool (BLAST) algorithm, which is described in Altschul et al, J. Mol. Biol. 215:403-410, 1990. A publicly available, internet interface, for performing BLAST analyses is accessible through the National Center for Biotechnology Information. Additional known algorithms include those published in: Smith & Waterman. “Comparison of Biosequences”, Adv. Appl. Math. 2:482, 1981; Needleman & Wunsch, “A general method applicable to the search for similarities in the amino acid sequence of two proteins” J. Mol. Biol. 48:443, 1970; Pearson & Lipman “Improved tools for biological sequence comparison”, Proc. Natl. Acad. Sci. USA 85:2444, 1988; or by automated implementation of these or similar algorithms. Global alignment programs may also be used to align similar sequences of roughly equal size. Examples of global alignment programs include NEEDLE (available at www.ebi.ac.ukiTools/psa/emboss_needle/) which is part of the EMBOSS package (Rice P et al., Trends Genet., 2000; 16: 276-277), and the GGSEARCH program fasta.bioch.virginia.edu/fasta_www2/, which is part of the FASTA package (Pearson W and Lipman D, 1988, Proc. Natl. Acad. Sci. USA, 85: 2444-2448). Both of these programs are based on the Needleman-Wunsch algorithm, which is used to find the optimum alignment (including gaps) of two sequences along their entire length. A detailed discussion of sequence analysis can also be found in Unit 19.3 of Ausubel et al (“Current Protocols in Molecular Biology” John Wiley & Sons Inc, 1994-1998, Chapter 15, 1998).

[0196] A skilled person understands that amino acid (or nucleotide) positions may be determined in homologous sequences based on alignment. For example, “H840” in a reference Cas9 sequence may correspond to H839, or another corresponding position in a Cas9 homolog when aligned to the reference Cas9 sequence.

### Host Cell

[0197] The term “host cell,” as used herein, refers to a cell that can host, replicate, and express a vector described herein, e.g., a vector comprising a nucleic acid molecule encoding an MLH1 variant and a fusion protein comprising a Cas9 or Cas9 equivalent and a reverse transcriptase.

### Inhibit

[0198] As used herein the term “inhibiting,” “inhibit,” or “inhibition” in the context of proteins and enzymes, for example, in the context of enzymes involved in the DNA mismatch repair pathway, refers to a reduction in the activity of the protein or enzyme. In some embodiments, the term refers to a reduction of the level of enzyme activity, e.g., the activity of one or more enzymes in the DNA mismatch repair pathway, to a level that is statistically significantly lower than an initial level, which may, for example, be a baseline level of enzyme activity. In some embodiments, the term refers to a reduction of the level of enzyme activity, e.g., the activity of one or more enzymes in the DNA mismatch repair pathway, to a level that is less than 75%, less than 50%, less than 40%, less than 30%, less than 25%, less than 20%, less than 10%, less than 9%, less than 8%, less than 7%, less than 6%, less than 5%, less than 4%, less than 3%, less than 2%, less than 1%, less than 0.5%, less than 0.1%, less than 0.01%, less than 0.001%, or less than 0.0001% of an initial level, which may, for example, be a baseline level of enzyme activity.

### Linker

[0199] The term “linker,” as used herein, refers to a molecule linking two other molecules or moieties. The linker can be an amino acid sequence in the case of a linker joining two fusion proteins. For example, a Cas9 can be fused to a reverse transcriptase by an amino acid linker sequence. The linker can also be a nucleotide sequence in the case of joining two nucleotide sequences together. For example, in the instant case, the traditional guide RNA is linked via a spacer or linker nucleotide sequence to the RNA extension of a prime editing guide RNA which may comprise a RT template sequence and an RT primer binding site. In other embodiments, the linker is an organic molecule, group, polymer, or chemical moiety. In some embodiments, the linker is 5-100 amino acids in length, for example, 5, 6, 7, 8, 9, 10, 11, 12, 13, 14, 15, 16, 17, 18, 19, 20, 21, 22, 23, 24, 25, 26, 27, 28, 29, 30, 30-35, 35-40, 40-45, 45-50, 50-60, 60-70, 70-80, 80-90, 90-100, 100-150, or 150-200 amino acids in length. Longer or shorter linkers are also contemplated. In certain embodiments, the linker is a self-hydrolyzing linker (e.g., a 2A self-cleaving peptide as described further herein). Self-hydrolyzing linkers such as 2A self-cleaving peptides are capable of inducing ribosomal skipping during protein translation, resulting in the ribosome failing to make a peptide bond between two genes, or gene fragments.

### MLH1

[0200] The term “MLH1” refers to a gene encoding MLH1 (or MutL Homolog 1), a DNA mismatch repair enzyme. The protein encoded by this gene can heterodimerize with mismatch repair endonuclease PMS2 to form MutL alpha (MutLα), part of the DNA mismatch repair system. MLH1 mediates protein-protein interactions during mismatch recognition, strand discrimination, and strand removal. In mismatch repair, the heterodimer MSH2:MSH6 (MutSα) forms and binds the mismatch. MLH1 then forms a heterodimer with PMS2 (MutLα) and binds the MSH2:MSH6 heterodimer. The MutLα heterodimer then incises the nicked strand 5′ and 3′ of the mismatch, followed by excision of the mismatch from MutLα-generated nicks by EXO1. Finally, POLδ resynthesizes the excised strand, followed by LIG1 ligation.

[0201] An exemplary amino acid sequence of MLH1 is human isoform 1, P40692-1:

>sp|P40692|MLH1_HUMAN DNA mismatch repair protein Mlh1 OS = Homo sapiens OX = 9606
GN = MLH1 PE = 1 SV = 1:
(SEQ ID NO: 204)
MSFVAGVIRRLDETVVNRIAAGEVIQRPANAIKEMIENCLDAKSTSIQVIVKEGGLKLIQIQDNGTGIRKEDL
DIVCERFTTSKLQSFEDLASISTYGFRGEALASISHVAHVTITTKTADGKCAYRASYSDGKLKAPPKPCAGN
QGTQITVEDLFYNIATRRKALKNPSEEYGKILEVVGRYSVHNAGISFSVKKQGETVADVRTLPNASTVDNIR
SIFGNAVSRELIEIGCEDKTLAFKMNGYISNANYSVKKCIFLLFINHRLVESTSLRKAIETVYAAYLPKNTHPF
LYLSLEISPQNVDVNVHPTKHEVHFLHEESILERVQQHIESKLLGSNSSRMYFTQTLLPGLAGPSGEMVKST
TSLTSSSTSGSSDKVYAHQMVRTDSREQKLDAFLQPLSKPLSSQPQAIVTEDKTDISSGRARQQDEEMLELP
APAEVAAKNQSLEGDTTKGTSEMSEKRGPTSSNPRKRHREDSDVEMVEDDSRKEMTAACTPRRRIINLTSV
LSLQEEINEQGHEVLREMLHNHSFVGCVNPQWALAQHQTKLYLLNTTKLSEELFYQILIYDFANFGVLRLS
EPAPLFDLAMLALDSPESGWTEEDGPKEGLAEYIVEFLKKKAEMLADYFSLEIDEEGNLIGLPLLIDNYVPPL
EGLPIFILRLATEVNWDEEKECFESLSKECAMFYSIRKQYISEESTLSGQQSEVPGSIPNSWKWTVEHIVYKA
LRSHILPPKHFTEDGNILQLANLPDLYKVFERC,

[0202] or an amino acid sequence having at least 70%, at least 75%, at least 80%, at least 85%, at least 90%, at least 95%, at least 96%, at least 97%, at least 98%, at least 99%, or up to and including 100% sequence identity with SEQ ID NO: 204.

[0203] Another exemplary amino acid sequence of MLH1 is human isoform 2, P40692-2 (wherein amino acids 1-241 of isoform 1 are missing): >sp|P40692-2|MLH1_HUMAN Isoform 2 of DNA mismatch repair protein Mlh 1 OS═Homo sapiens OX=9606 GN=MLH1:

(SEQ ID NO: 205)
MNGYISNANYSVKKCIFLLFINHRLVESTSLRKAIETVYAAYLPKNTHPFLYLSLEISPQNVDVNVHPTKHE
VHFLHEESILERVQQHIESKLLGSNSSRMYFTQTLLPGLAGPSGEMVKSTTSLTSSSTSGSSDKVYAHQMVR
TDSREQKLDAFLQPLSKPLSSQPQAIVTEDKTDISSGRARQQDEEMLELPAPAEVAAKNQSLEGDTTKGTSE
MSEKRGPTSSNPRKRHREDSDVEMVEDDSRKEMTAACTPRRRIINLTSVLSLQEEINEQGHEVLREMLHNH
SFVGCVNPQWALAQHQTKLYLLNTTKLSEELFYQILIYDFANFGVLRLSEPAPLFDLAMLALDSPESGWTE
EDGPKEGLAEYIVEFLKKKAEMLADYFSLEIDEEGNLIGLPLLIDNYVPPLEGLPIFILRLATEVNWDEEKEC
FESLSKECAMFYSIRKQYISEESTLSGQQSEVPGSIPNSWKWTVEHIVYKALRSHILPPKHFTEDGNILQLAN
LPDLYKVFERC,

[0204] or an amino acid sequence having at least 70%, at least 75%, at least 80%, at least 85%, at least 90%, at least 95%, at least 96%, at least 97%, at least 98%, at least 99%, or up to and including 100% sequence identity with SEQ ID NO: 205.

[0205] Another exemplary amino acid sequence of MLH1 is human isoform 3, P40692-3 (where amino acids 1-101 (MSFVAGVIRR . . . ASISTYGFRG (SEQ ID NO: 206) is replaced with MAF): >sp|P40692-2|MLH1_HUMAN Isoform 2 of DNA mismatch repair protein Mlh1 OS═Homo sapiens OX=9606 GN=MLH1:

(SEQ ID NO: 207)
MAFEALASISHVAHVTITTKTADGKCAYRASYSDGKLKAPPKPCAGNQGTQITVEDLFYNIATRRKALKNP
SEEYGKILEVVGRYSVHNAGISFSVKKQGETVADVRTLPNASTVDNIRSIFGNAVSRELIEIGCEDKTLAFKM
NGYISNANYSVKKCIFLLFINHRLVESTSLRKAIETVYAAYLPKNTHPFLYLSLEISPQNVDVNVHPTKHEVH
FLHEESILERVQQHIESKLLGSNSSRMYFTQTLLPGLAGPSGEMVKSTTSLTSSSTSGSSDKVYAHQMVRTD
SREQKLDAFLQPLSKPLSSQPQAIVTEDKTDISSGRARQQDEEMLELPAPAEVAAKNQSLEGDTTKGTSEMS
EKRGPTSSNPRKRHREDSDVEMVEDDSRKEMTAACTPRRRIINLTSVLSLQEEINEQGHEVLREMLHNHSF
VGCVNPQWALAQHQTKLYLLNTTKLSEELFYQILIYDFANFGVLRLSEPAPLFDLAMLALDSPESGWTEED
GPKEGLAEYIVEFLKKKAEMLADYFSLEIDEEGNLIGLPLLIDNYVPPLEGLPIFILRLATEVNWDEEKECFES
LSKECAMFYSIRKQYISEESTLSGQQSEVPGSIPNSWKWTVEHIVYKALRSHILPPKHFTEDGNILQLANLPD
LYKVFERC,

[0206] or an amino acid sequence having at least 70%, at least 75%, at least 80%, at least 85%, at least 90%, at least 95%, at least 96%, at least 97%, at least 98%, at least 99%, or up to and including 100% sequence identity with SEQ ID NO: 207.

[0207] The present disclosure contemplates targeting MLH1 and/or MMR pathway components that interact with MLH1, including any wildtype or naturally occurring variant of MLH1, including any amino acid sequence having at least 70%, or 75%, or 80%, or 85%, or 90%, or 95%, or 99% or more sequence identity with any of SEQ ID NOs: 204, 208-213, 215, 216, 218, 222, or 223, or nucleic acid molecules encoding any MLH1 or variant of MLH1 (e.g., a dominant negative mutant of MLH1 as described herein), for inhibiting, blocking, or otherwise inactivating the wild type MLH1 function in the MMR pathway, and consequently, inhibiting, blocking, or otherwise inactivating the MMR pathway, e.g., during genome editing with a prime editor.

[0208] In some embodiments, inactivation of the MMR pathway involves an inhibitor that disrupts, blocks, interferes with, or otherwise inactivates the wild type function of the MLH1 protein. In some embodiments, inactivation of the MMR pathway involves a mutant of the MLH1 protein, for example, contacting a target cell with a MLH1 mutant protein or expressing in a target cell an MLH1 mutant nucleic acid that encodes an MLH1 mutant protein. In some embodiments, the MLH1 mutant protein interferes with, and thereby inactivates, the function of a wild type MLH1 protein in the MMR pathway. In some embodiments, the MLH1 mutant is a dominant negative mutant. In some embodiments, the MLH mutant protein is capable of binding to an MLH1-interacting protein, for example, MutS.

[0209] Without being bound by theory, MLH1 dominant negative mutants function by saturating binding of MutS, thereby blocking MutS-wild type MLH1 binding and interfering with the function of the wild type MLH1 protein in the MMR pathway.

[0210] In various embodiments, the dominant negative MLH1 can include, for example, MLH1 E34A, which is based on SEQ ID NO: 222 and having the following amino acid sequence (underline and bolded to show the E34A mutation):

(SEQ ID NO: 222)
MSFVAGVIRRLDETVVNRIAAGEVIQRPANAIKAMIENCLDAKSTSIQVIVKEGGLKLIQIQDNGTGIRKEDL
DIVCERFTTSKLQSFEDLASISTYGFRGEALASISHVAHVTITTKTADGKCAYRASYSDGKLKAPPKPCAGN
QGTQITVEDLFYNIATRRKALKNPSEEYGKILEVVGRYSVHNAGISFSVKKQGETVADVRTLPNASTVDNIR
SIFGNAVSRELIEIGCEDKTLAFKMNGYISNANYSVKKCIFLLFINHRLVESTSLRKAIETVYAAYLPKNTHPF
LYLSLEISPQNVDVNVHPTKHEVHFLHEESILERVQQHIESKLLGSNSSRMYFTQTLLPGLAGPSGEMVKST
TSLTSSSTSGSSDKVYAHQMVRTDSREQKLDAFLQPLSKPLSSQPQAIVTEDKTDISSGRARQQDEEMLELP
APAEVAAKNQSLEGDTTKGTSEMSEKRGPTSSNPRKRHREDSDVEMVEDDSRKEMTAACTPRRRIINLTSV
LSLQEEINEQGHEVLREMLHNHSFVGCVNPQWALAQHQTKLYLLNTTKLSEELFYQILIYDFANFGVLRLS
EPAPLFDLAMLALDSPESGWTEEDGPKEGLAEYIVEFLKKKAEMLADYFSLEIDEEGNLIGLPLLIDNYVPPL
EGLPIFILRLATEVNWDEEKECFESLSKECAMFYSIRKQYISEESTLSGQQSEVPGSIPNSWKWTVEHIVYKA
LRSHILPPKHFTEDGNILQLANLPDLYKVFERC,

[0211] or an amino acid sequence having at least 70%, at least 75%, at least 80%, at least 85%, at least 90%, at least 95%, at least 96%, at least 97%, at least 98%, at least 99%, or up to and including 100% sequence identity with SEQ ID NO: 222.

[0212] In various other embodiments, the dominant negative MLH1 can include, for example, MLH1 Δ756, which is based on SEQ ID NO: 208 and having the following amino acid sequence (underline and bolded to show the Δ756 mutation at the C terminus of the sequence):

(SEQ ID NO: 208)
MSFVAGVIRRLDETVVNRIAAGEVIQRPANAIKEMIENCLDAKSTSIQVIVKEGGLKLIQIQDNGTGIRKEDL
DIVCERFTTSKLQSFEDLASISTYGFRGEALASISHVAHVTITTKTADGKCAYRASYSDGKLKAPPKPCAGN
QGTQITVEDLFYNIATRRKALKNPSEEYGKILEVVGRYSVHNAGISFSVKKQGETVADVRTLPNASTVDNIR
SIFGNAVSRELIEIGCEDKTLAFKMNGYISNANYSVKKCIFLLFINHRLVESTSLRKAIETVYAAYLPKNTHPF
LYLSLEISPQNVDVNVHPTKHEVHFLHEESILERVQQHIESKLLGSNSSRMYFTQTLLPGLAGPSGEMVKST
TSLTSSSTSGSSDKVYAHQMVRTDSREQKLDAFLQPLSKPLSSQPQAIVTEDKTDISSGRARQQDEEMLELP
APAEVAAKNQSLEGDTTKGTSEMSEKRGPTSSNPRKRHREDSDVEMVEDDSRKEMTAACTPRRRIINLTSV
LSLQEEINEQGHEVLREMLHNHSFVGCVNPQWALAQHQTKLYLLNTTKLSEELFYQILIYDFANFGVLRLS
EPAPLFDLAMLALDSPESGWTEEDGPKEGLAEYIVEFLKKKAEMLADYFSLEIDEEGNLIGLPLLIDNYVPPL
EGLPIFILRLATEVNWDEEKECFESLSKECAMFYSIRKQYISEESTLSGQQSEVPGSIPNSWKWTVEHIVYKA
LRSHILPPKHFTEDGNILQLANLPDLYKVFER[−],

[0213] or an amino acid sequence having at least 70%, at least 75%, at least 80%, at least 85%, at least 90%, at least 95%, at least 96%, at least 97%, at least 98%, at least 99%, or up to and including 100% sequence identity with SEQ ID NO: 208 (wherein the [−] indicates deleted amino acid residue(s) relative to the parent or wildtype sequence).

[0214] In still other embodiments, the dominant negative MLH1 can include, for example, MLH1 Δ754-Δ756, which is based on SEQ ID NO: 209 and having the following amino acid sequence (underline and bolded to show the Δ754-Δ756 mutation at the C terminus of the sequence):

(SEQ ID NO: 209)
MSFVAGVIRRLDETVVNRIAAGEVIQRPANAIKEMIENCLDAKSTSIQVIVKEGGLKLIQIQDNGTGIRKEDL
DIVCERFTTSKLQSFEDLASISTYGFRGEALASISHVAHVTITTKTADGKCAYRASYSDGKLKAPPKPCAGN
QGTQITVEDLFYNIATRRKALKNPSEEYGKILEVVGRYSVHNAGISFSVKKQGETVADVRTLPNASTVDNIR
SIFGNAVSRELIEIGCEDKTLAFKMNGYISNANYSVKKCIFLLFINHRLVESTSLRKAIETVYAAYLPKNTHPF
LYLSLEISPQNVDVNVHPTKHEVHFLHEESILERVQQHIESKLLGSNSSRMYFTQTLLPGLAGPSGEMVKST
TSLTSSSTSGSSDKVYAHQMVRTDSREQKLDAFLQPLSKPLSSQPQAIVTEDKTDISSGRARQQDEEMLELP
APAEVAAKNQSLEGDTTKGTSEMSEKRGPTSSNPRKRHREDSDVEMVEDDSRKEMTAACTPRRRIINLTSV
LSLQEEINEQGHEVLREMLHNHSFVGCVNPQWALAQHQTKLYLLNTTKLSEELFYQILIYDFANFGVLRLS
EPAPLFDLAMLALDSPESGWTEEDGPKEGLAEYIVEFLKKKAEMLADYFSLEIDEEGNLIGLPLLIDNYVPPL
EGLPIFILRLATEVNWDEEKECFESLSKECAMFYSIRKQYISEESTLSGQQSEVPGSIPNSWKWTVEHIVYKA
LRSHILPPKHFTEDGNILQLANLPDLYKVF[---],

[0215] or an amino acid sequence having at least 70%, at least 75%, at least 80%, at least 85%, at least 90%, at least 95%, at least 96%, at least 97%, at least 98%, at least 99%, or up to and including 100% sequence identity with SEQ ID NO: 209 (wherein the [- - - ] indicates deleted amino acid residue(s) relative to the parent or wildtype sequence).

[0216] In yet other embodiments, the dominant negative MLH1 can include, for example, MLH1 E34A Δ754-Δ756, which is based on SEQ ID NO: 210 and having the following amino acid sequence (underline and bolded to show the E34A and Δ754-Δ756 mutations):

(SEQ ID NO: 210)
MSFVAGVIRRLDETVVNRIAAGEVIQRPANAIKAMIENCLDAKSTSIQVIVKEGGLKLIQIQDNGTGIRKEDL
DIVCERFTTSKLQSFEDLASISTYGFRGEALASISHVAHVTITTKTADGKCAYRASYSDGKLKAPPKPCAGN
QGTQITVEDLFYNIATRRKALKNPSEEYGKILEVVGRYSVHNAGISFSVKKQGETVADVRTLPNASTVDNIR
SIFGNAVSRELIEIGCEDKTLAFKMNGYISNANYSVKKCIFLLFINHRLVESTSLRKAIETVYAAYLPKNTHPF
LYLSLEISPQNVDVNVHPTKHEVHFLHEESILERVQQHIESKLLGSNSSRMYFTQTLLPGLAGPSGEMVKST
TSLTSSSTSGSSDKVYAHQMVRTDSREQKLDAFLQPLSKPLSSQPQAIVTEDKTDISSGRARQQDEEMLELP
APAEVAAKNQSLEGDTTKGTSEMSEKRGPTSSNPRKRHREDSDVEMVEDDSRKEMTAACTPRRRIINLTSV
LSLQEEINEQGHEVLREMLHNHSFVGCVNPQWALAQHQTKLYLLNTTKLSEELFYQILIYDFANFGVLRLS
EPAPLFDLAMLALDSPESGWTEEDGPKEGLAEYIVEFLKKKAEMLADYFSLEIDEEGNLIGLPLLIDNYVPPL
EGLPIFILRLATEVNWDEEKECFESLSKECAMFYSIRKQYISEESTLSGQQSEVPGSIPNSWKWTVEHIVYKA
LRSHILPPKHFTEDGNILQLANLPDLYKVF[---],

[0217] or an amino acid sequence having at least 70%, at least 75%, at least 80%, at least 85%, at least 90%, at least 95%, at least 96%, at least 97%, at least 98%, at least 99%, or up to and including 100% sequence identity with SEQ ID NO: 210.

[0218] In certain embodiments, the dominant negative MLH1 can include, for example, MLH1 1-335, which is based on SEQ ID NO: 211 and having the following amino acid sequence (contains amino acids 1-335 of SEQ NO: 204):

(SEQ ID NO: 211)
MSFVAGVIRRLDETVVNRIAAGEVIQRPANAIKEMIENCLDAKSTSIQVIVKEGGLKLIQIQDNGTGIRKEDL
DIVCERFTTSKLQSFEDLASISTYGFRGEALASISHVAHVTITTKTADGKCAYRASYSDGKLKAPPKPCAGN
QGTQITVEDLFYNIATRRKALKNPSEEYGKILEVVGRYSVHNAGISESVKKQGETVADVRTLPNASTVDNIR
SIFGNAVSRELIEIGCEDKTLAFKMNGYISNANYSVKKCIFLLFINHRLVESTSLRKAIETVYAAYLPKNTHPF
LYLSLEISPQNVDVNVHPTKHEVHFLHEESILERVQQHIESKLL,

[0219] or an amino acid sequence having at least 70%, at least 75%, at least 80%, at least 85%, at least 90%, at least 95%, at least 96%, at least 97%, at least 98%, at least 99%, or up to and including 100% sequence identity with SEQ ID NO: 211.

[0220] In other embodiments, the dominant negative MLH1 can include, for example, MLH1 1-335 E34A, which is based on SEQ ID NO: 212 and having the following amino acid sequence (contains amino acids 1-335 of SEQ NO: 204 and a E34A mutation relative to SEQ ID NO: 204):

(SEQ ID NO: 212)
MSFVAGVIRRLDETVVNRIAAGEVIQRPANAIKAMIENCLDAKSTSIQVI
VKEGGLKLIQIQDNGTGIRKEDLDIVCERFTTSKLQSFEDLASISTYGFR
GEALASISHVAHVTITTKTADGKCAYRASYSDGKLKAPPKPCAGNQGTQI
TVEDLFYNIATRRKALKNPSEEYGKILEVVGRYSVHNAGISFSVKKQGET
VADVRTLPNASTVDNIRSIFGNAVSRELIEIGCEDKTLAFKMNGYISNAN
YSVKKCIFLLFINHRLVESTSLRKAIETVYAAYLPKNTHPFLYLSLEISP
QNVDVNVHPTKHEVHFLHEESILERVQQHIESKLL,

[0221] or an amino acid sequence having at least 70%, at least 75%, at least 80%, at least 85%, at least 90%, at least 95%, at least 96%, at least 97%, at least 98%, at least 99%, or up to and including 100% sequence identity with SEQ ID NO: 212.

[0222] In still other embodiments, the dominant negative MLH1 can include, for example, MLH1 1-335 NLS^{SV40} (or referred to as MLH1dn^{NTD}, which is based on SEQ ID NO: 204 and having the following amino acid sequence (contains amino acids 1-335 of SEQ NO: 204 and an NLS sequence of SV40):

(SEQ ID NO: 213)
MSFVAGVIRRLDETVVNRIAAGEVIQRPANAIKEMIENCLDAKSTSIQVI
VKEGGLKLIQIQDNGTGIRKEDLDIVCERFTTSKLQSFEDLASISTYGFR
GEALASISHVAHVTITTKTADGKCAYRASYSDGKLKAPPKPCAGNQGTQI
TVEDLFYNIATRRKALKNPSEEYGKILEVVGRYSVHNAGISFSVKKQGET
VADVRTLPNASTVDNIRSIFGNAVSRELIEIGCEDKTLAFKMNGYISNAN
YSVKKCIFLLFINHRLVESTSLRKAIETVYAAYLPKNTHPFLYLSLEISP
QNVDVNVHPTKHEVHFLHEESILERVQQHIESKLLPKKKRKV,

[0223] with the underlined and bolded portion referring to the NLS of SV40), or an amino acid sequence having at least 70%, at least 75%, at least 80%, at least 85%, at least 90%, at least 95%, at least 96%, at least 97%, at least 98%, at least 99%, or up to and including 100% sequence identity with SEQ ID NO: 213.

[0224] In still other embodiments, the dominant negative MLH1 can include, for example, MLH1 1-335 NLS^{alternate} (which is based on SEQ ID NO: 204 and having the following amino acid sequence (contains amino acids 1-335 of SEQ NO: 204 and an alternate NLS sequence)):

(SEQ ID NO: 214)
MSFVAGVIRRLDETVVNRIAAGEVIQRPANAIKEMIENCLDAKSTSIQVI
VKEGGLKLIQIQDNGTGIRKEDLDIVCERFTTSKLQSFEDLASISTYGFR
GEALASISHVAHVTITTKTADGKCAYRASYSDGKLKAPPKPCAGNQGTQI
TVEDLFYNIATRRKALKNPSEEYGKILEVVGRYSVHNAGISESVKKQGET
VADVRTLPNASTVDNIRSIFGNAVSRELIEIGCEDKTLAFKMNGYISNAN
YSVKKCIFLLFINHRLVESTSLRKAIETVYAAYLPKNTHPFLYLSLEISP
QNVDVNVHPTKHEVHFLHEESILERVQQHIESKLL-[alternate NLS
sequence]-[alternate NLS sequence],

[0225] or an amino acid sequence having at least 70%, at least 75%, at least 80%, at least 85%, at least 90%, at least 95%, at least 96%, at least 97%, at least 98%, at least 99%, or up to and including 100% sequence identity with SEQ ID NO: 214. The alternate NLS sequence can be any suitable NLS sequence, including but not limited to:

| Description | Sequence | SEQ ID NO: |
|---|---|---|
| NLS | MKRTADGSEFESPKKKRKV | SEQ ID NO: 101 |
| NLS | MDSLLMNRRKFLYQFKNVRWAKGRRETYLC | SEQ ID NO: 1 |
| NLS of nucleoplasmin | AVKRPAATKKAGQAKKKKLD | SEQ ID NO: 133 |
| NLS of EGL-13 | MSRRRKANPTKLSENAKKLAKEVEN | SEQ ID NO: 134 |
| NLS of c-MYC | PAAKRVKLD | SEQ ID NO: 135 |
| NLS of TUS-protein | KLKIKRPVK | SEQ ID NO: 136 |
| NLS of polyoma large T-Ag | VSRKRPRP | SEQ ID NO: 137 |
| NLS of Hepatitis D virus antigen | EGAPPAKRAR | SEQ ID NO: 138 |
| NLS of murine p53 | PPQPKKKPLDGE | SEQ ID NO: 139 |
| NLS of PE1 and PE2 | SGGSKRTADGSEFEPKKKRKV | SEQ ID NO: 103 |

In some embodiments, an NLS sequence is appended to the N-terminus of a protein and begins with a methionine (“M”). In other embodiments, an NLS sequence may be appended at the C-terminus of a protein, or between multiple domains of a fusion protein, and does not begin with a methionine (i.e., the M in, for example, SEQ ID NOs: 101, 1, and 134 is not included in the NLS when it is appended at the C-terminus or between two domains in a fusion protein).

[0226] In still other embodiments, the dominant negative MLH1 can include, for example, MLH1 501-756, which corresponds to a C-terminal fragment of SEQ ID NO: 204 that corresponds to amino acids 501-756 of SEQ ID NO: 204:

(SEQ ID NO: 215)
INLTSVLSLQEEINEQGHEVLREMLHNHSFVGCVNPQWALAQHQTKLYLL
NTTKLSEELFYQILIYDFANFGVLRLSEPAPLFDLAMLALDSPESGWTEE
DGPKEGLAEYIVEFLKKKAEMLADYFSLEIDEEGNLIGLPLLIDNYVPPL
EGLPIFILRLATEVNWDEEKECFESLSKECAMFYSIRKQYISEESTLSGQ
QSEVPGSIPNSWKWTVEHIVYKALRSHILPPKHFTEDGNILQLANLPDLY
KVFERC,

[0227] or an amino acid sequence having at least 70%, at least 75%, at least 80%, at least 85%, at least 90%, at least 95%, at least 96%, at least 97%, at least 98%, at least 99%, or up to and including 100% sequence identity with SEQ ID NO: 215.

[0228] In still other embodiments, the dominant negative MLH1 can include, for example, MLH1 501-753, which corresponds to a C-terminal fragment of SEQ ID NO: 204 that corresponds to amino acids 501-753 of SEQ ID NO: 204:

(SEQ ID NO: 216)
INLTSVLSLQEEINEQGHEVLREMLHNHSFVGCVNPQWALAQHQTKLYLL
NTTKLSEELFYQILIYDFANFGVLRLSEPAPLFDLAMLALDSPESGWTEE
DGPKEGLAEYIVEFLKKKAEMLADYFSLEIDEEGNLIGLPLLIDNYVPPL
EGLPIFILRLATEVNWDEEKECFESLSKECAMFYSIRKQYISEESTLSGQ
QSEVPGSIPNSWKWTVEHIVYKALRSHILPPKHFTEDGNILQLANLPDLY
KVF[---],

[0229] or an amino acid sequence having at least 70%, at least 75%, at least 80%, at least 85%, at least 90%, at least 95%, at least 96%, at least 97%, at least 98%, at least 99%, or up to and including 100% sequence identity with SEQ ID NO: 216.

[0230] In still other embodiments, the dominant negative MLH1 can include, for example, MLH1 461-756, which is a C-terminal fragment of SEQ ID NO: 204 that corresponds to amino acids 461-756 of SEQ ID NO: 204:

(SEQ ID NO: 217)
KRGPTSSNPRKRHREDSDVEMVEDDSRKEMTAACTPRRRIINLTSVLSLQ
EEINEQGHEVLREMLHNHSFVGCVNPQWALAQHQTKLYLLNTTKLSEELF
YQILIYDFANFGVLRLSEPAPLFDLAMLALDSPESGWTEEDGPKEGLAEY
IVEFLKKKAEMLADYFSLEIDEEGNLIGLPLLIDNYVPPLEGLPIFILRL
ATEVNWDEEKECFESLSKECAMFYSIRKQYISEESTLSGQQSEVPGSIPN
SWKWTVEHIVYKALRSHILPPKHFTEDGNILQLANLPDLYKVFERC,

[0231] or an amino acid sequence having at least 70%, at least 75%, at least 80%, at least 85%, at least 90%, at least 95%, at least 96%, at least 97%, at least 98%, at least 99%, or up to and including 100% sequence identity with SEQ ID NO: 217.

[0232] In various embodiments, the dominant negative MLH1 can include, for example, MLH1 461-753, which is a C-terminal fragment of SEQ ID NO: 204 that corresponds to amino acids 461-753 of SEQ ID NO: 204:

(SEQ ID NO: 218)
KRGPTSSNPRKRHREDSDVEMVEDDSRKEMTAACTPRRRIINLTSVLSLQ
EEINEQGHEVLREMLHNHSFVGCVNPQWALAQHQTKLYLLNTTKLSEELF
YQILIYDFANFGVLRLSEPAPLFDLAMLALDSPESGWTEEDGPKEGLAEY
IVEFLKKKAEMLADYFSLEIDEEGNLIGLPLLIDNYVPPLEGLPIFILRL
ATEVNWDEEKECFESLSKECAMFYSIRKQYISEESTLSGQQSEVPGSIPN
SWKWTVEHIVYKALRSHILPPKHFTEDGNILQLANLPDLYKVF[---],

[0233] or an amino acid sequence having at least 70%, at least 75%, at least 80%, at least 85%, at least 90%, at least 95%, at least 96%, at least 97%, at least 98%, at least 99%, or up to and including 100% sequence identity with SEQ ID NO: 218.

[0234] In various other embodiments, the dominant negative MLH1 can include, for example, MLH1 461-753, which is a C-terminal fragment of SEQ ID NO: 204 that corresponds to amino acids 461-753 of SEQ ID NO: 204, and which further comprises an N-terminal NLS, e.g., NLS^{SV40}:

(SEQ ID NO: 218)
[NLS]-KRGPTSSNPRKRHREDSDVEMVEDDSRKEMTAACTPRRRIINLT
SVLSLQEEINEQGHEVLREMLHNHSFVGCVNPQWALAQHQTKLYLLNTTK
LSEELFYQILIYDFANFGVLRLSEPAPLFDLAMLALDSPESGWTEEDGPK
EGLAEYIVEFLKKKAEMLADYFSLEIDEEGNLIGLPLLIDNYVPPLEGLP
IFILRLATEVNWDEEKECFESLSKECAMFYSIRKQYISEESTLSGQQSEV
PGSIPNSWKWTVEHIVYKALRSHILPPKHFTEDGNILQLANLPDLYKVF
[---],

[0235] or an amino acid sequence having at least 70%, at least 75%, at least 80%, at least 85%, at least 90%, at least 95%, at least 96%, at least 97%, at least 98%, at least 99%, or up to and including 100% sequence identity with SEQ ID NO: 218. The NLS sequence can be any suitable NLS sequence, including but not limited to SEQ ID NOs: 1, 101, 103, 133-139.
   napDNAbp

[0236] As used herein, the term “nucleic acid programmable DNA binding protein” or “napDNAbp,” of which Cas9 is an example, refer to proteins that use RNA:DNA hybridization to target and bind to specific sequences in a DNA molecule. Each napDNAbp is associated with at least one guide nucleic acid (e.g., guide RNA), which localizes the napDNAbp to a DNA sequence that comprises a DNA strand (i.e., a target strand) that is complementary to the guide nucleic acid, or a portion thereof (e.g., the protospacer of a guide RNA). In other words, the guide nucleic-acid “programs” the napDNAbp (e.g., Cas9 or equivalent) to localize and bind to a complementary sequence.

[0237] Without being bound by theory, the binding mechanism of a napDNAbp—guide RNA complex, in general, includes the step of forming an R-loop whereby the napDNAbp induces the unwinding of a double-strand DNA target, thereby separating the strands in the region bound by the napDNAbp. The guide RNA spacer sequence then hybridizes to the “target strand.” This displaces a “non-target strand” that is complementary to the target strand, which forms the single strand region of the R-loop. In some embodiments, the napDNAbp includes one or more nuclease activities, which then cut the DNA, leaving various types of lesions. For example, the napDNAbp may comprises a nuclease activity that cuts the non-target strand at a first location, and/or cuts the target strand at a second location. Depending on the nuclease activity, the target DNA can be cut to form a “double-stranded break” whereby both strands are cut. In other embodiments, the target DNA can be cut at only a single site, i.e., the DNA is “nicked” on one strand. Exemplary napDNAbp with different nuclease activities include “Cas9 nickase” (“nCas9”) and a deactivated Cas9 having no nuclease activities (“dead Cas9” or “dCas9”). Exemplary sequences for these and other napDNAbp are provided herein.

### Nickase

[0238] The term “nickase.” as used herein, may refer to a Cas9 with one of the two nuclease domains inactivated. This enzyme is capable of cleaving only one strand of a target DNA. As used herein, a “nickase” may refer to a napDNAbp (e.g., a Cas protein) which is capable of cleaving only one of the two complementary strands of a double-stranded target DNA sequence, thereby generating a nick in that strand. In some embodiments, the nickase cleaves a non-target strand of a double stranded target DNA sequence. In some embodiments, the nickase comprises an amino acid sequence with one or more mutations in a catalytic domain of a canonical napDNAbp (e.g., a Cas protein), wherein the one or more mutations reduces or abolishes nuclease activity of the catalytic domain. In certain embodiments, the napDNAbp is a Cas9 nickase, a Cas12a nickase, or a Cas12b1 nickase. In some embodiments, the nickase is a Cas9 that comprises one or more mutations in a RuvC-like domain relative to a wild type Cas9 sequence or to an equivalent amino acid position in other Cas9 variants or Cas9 equivalents. In some embodiments, the nickase is a Cas9 that comprises one or more mutations in an HNH-like domain relative to a wild type Cas9 sequence or to an equivalent amino acid position in other Cas9 variants or Cas9 equivalents. In some embodiments, the nickase is a Cas9 that comprises an aspartate-to-alanine substitution (D10A) in the RuvC I catalytic domain of Cas9 relative to a canonical Cas9 sequence or to an equivalent amino acid position in other Cas9 variants or Cas9 equivalents. In some embodiments, the nickase is a Cas9 that comprises a H840A, N854A, and/or N863A mutation relative to a canonical Cas9 sequence, or to an equivalent amino acid position in other Cas9 variants or Cas9 equivalents. In some embodiments, the term “Cas9 nickase” refers to a Cas9 with one of the two nuclease domains inactivated. This enzyme is capable of cleaving only one strand of a target DNA. In some embodiments, the nickase is a Cas protein that is not a Cas9 nickase.

[0239] In some embodiments, the napDNAbp of the prime editing complex comprises an endonuclease having nucleic acid programmable DNA binding ability. In some embodiments, the napDNAbp comprises an active endonuclease capable of cleaving both strands of a double stranded target DNA. In some embodiments, the napDNAbp is a nuclease active endonuclease, e.g., a nuclease active Cas protein, that can cleave both strands of a double stranded target DNA by generating a nick on each strand. For example, a nuclease active Cas protein can generate a cleavage (a nick) on each strand of a double stranded target DNA. In some embodiments, the two nicks on both strands are staggered nicks, for example, generated by a napDNAbp comprising a Cas12a or Cas12b1. In some embodiments, the two nicks on both strands are at the same genomic position, for example, generated by a napDNAbp comprising a nuclease active Cas9. In some embodiments, the napDNAbp comprises an endonuclease that is a nickase. For example, in some embodiments, the napDNAbp comprises an endonuclease comprising one or more mutations that reduce nuclease activity of the endonuclease, rendering it a nickase. In some embodiments, the napDNAbp comprises an inactive endonuclease. For example, in some embodiments, the napDNAbp comprises an endonuclease comprising one or more mutations that abolish the nuclease activity. In various embodiments, the napDNAbp is a Cas9 protein or variant thereof. The napDNAbp can also be a nuclease active Cas9, a nuclease inactive Cas9 (dCas9), or a Cas9 nickase (nCas9). In a preferred embodiment, the napDNAbp is Cas9 nickase (nCas9) that nicks only a single strand. In certain embodiments, the napDNAbp is a Cas9 nickase, a Cas12a nickase, or a Cas12b1 nickase. In some embodiments, the napDNAbp can be selected from the group consisting of: Cas9, Cas12e, Cas12d, Cas12a, Cas12b1, Cas12b2, Cas13a, Cas12c, Cas12d, Cas12e, Cas12h, Cas12i, Cas12g, Cas12f (Cas14), Cas12f1, Cas12j (CasΦ), and Argonaute, and optionally has a nickase activity such that only one strand is cut. In some embodiments, the napDNAbp is selected from Cas9, Cas12e, Cas12d, Cas12a, Cas12b1, Cas12b2, Cas13a, Cas12c, Cas12d, Cas12e, Cas12h, Cas12i, Cas12g, Cas12f (Cas14), Cas12f1, Cas12j (CasΦ), and Argonaute, and optionally has a nickase activity such that one DNA strand is cut preferentially to the other DNA strand.

### Nick Site

[0240] The terms “cleavage site,” “nick site.” and “cut site” as used interchangeably herein in the context of prime editing, refer to a specific position in between two nucleotides or two base pairs in the double-stranded target DNA sequence. In some embodiments, the position of a nick site is determined relative to the position of a specific PAM sequence. In some embodiments, the nick site is the particular position where a nick will occur when the double stranded target DNA is contacted with a napDNAbp, e.g., a nickase such as a Cas nickase, that recognizes a specific PAM sequence. For each PEgRNA described herein, a nick site is characteristic of the particular napDNAbp to which the gRNA core of the PEgRNA associates with, and is characteristic of the particular PAM required for recognition and function of the napDNAbp. For example, for a PEgRNA that comprises a gRNA core that associates with a SpCas9, the nick site in the phosphodiester bond between bases three (“−3” position relative to the position 1 of the PAM sequence) and four (“−4” position relative to position 1 of the PAM sequence).

[0241] In some embodiments, a nick site is in a target strand of the double-stranded target DNA sequence. In some embodiments, a nick site is in a non-target strand of the double-stranded target DNA sequence. In some embodiments, the nick site is in a protospacer sequence. In some embodiments, the nick site is adjacent to a protospacer sequence. In some embodiments, a nick site is downstream of a region, e.g., on a non-target strand, that is complementary to a primer binding site of a PEgRNA. In some embodiments, a nick site is downstream of a region, e.g., on a non-target strand, that binds to a primer binding site of a PEgRNA. In some embodiments, a nick site is immediately downstream of a region, e.g., on a non-target strand, that is complementary to a primer binding site of a PEgRNA. In some embodiments, the nick site is upstream of a specific PAM sequence on the non-target strand of the double stranded target DNA, wherein the PAM sequence is specific for recognition by a napDNAbp that associates with the gRNA core of a PEgRNA. In some embodiments, the nick site is downstream of a specific PAM sequence on the non-target strand of the double stranded target DNA, wherein the PAM sequence is specific for recognition by a napDNAbp that associates with the gRNA core of a PEgRNA. In some embodiments, the nick site is 3 nucleotides upstream of the PAM sequence, and the PAM sequence is recognized by a Streptococcus pyogenes Cas9 nickase, a P. lavamentivorans Cas9 nickase, a C. diphtheriae Cas9 nickase, a N. cinerea Cas9, a S. aureus Cas9, or a N. lari Cas9 nickase. In some embodiments, the nick site is 3 nucleotides upstream of the PAM sequence, and the PAM sequence is recognized by a Cas9 nickase, wherein the Cas9 nickase comprises a nuclease active HNH domain and a nuclease inactive RuvC domain. In some embodiments, the nick site is 2 base pairs upstream of the PAM sequence, and the PAM sequence is recognized by a S. thermophilus Cas9 nickase.

### Nucleic Acid Molecule

[0242] The term “nucleic acid,” as used herein, refers to a polymer of nucleotides. The polymer may include natural nucleosides (i.e., adenosine, thymidine, guanosine, cytidine, uridine, deoxyadenosine, deoxythymidine, deoxyguanosine, and deoxycytidine), nucleoside analogs (e.g., 2-aminoadenosine, 2-thiothymidine, inosine, pyrrolo-pyrimidine, 3-methyl adenosine, 5-methylcytidine, C5 bromouridine, C5 fluorouridine, C5 iodouridine, C5 propynyl uridine, C5 propynyl cytidine, C5 methylcytidine, 7 deazaadenosine, 7 deazaguanosine, 8 oxoadenosine, 8 oxoguanosine, O(6) methylguanine, 4-acetylcytidine, 5-(carboxyhydroxymethyl)uridine, dihydrouridine, methylpseudouridine, 1-methyl adenosine, 1-methyl guanosine, N6-methyl adenosine, and 2-thiocytidine), chemically modified bases, biologically modified bases (e.g., methylated bases), intercalated bases, modified sugars (e.g., 2′-fluororibose, ribose, 2′-deoxyribose, 2′-O-methylcytidine, arabinose, and hexose), or modified phosphate groups (e.g., phosphorothioates and 5′ N phosphoramidite linkages).

### P53

[0243] As used herein, “p53” refers to tumor protein 53. Among other functions, p53 plays a role in DNA damage and repair, specifically in its role in regulation of the cell cycle, apoptosis, and genomic stability. P53 can activate DNA repair proteins when DNA has been damaged. P53 may also arrest cell growth by holding the cell cycle at the G1/S regulation point on DNA damage recognition, thereby providing DNA repair proteins more time to fix the DNA damage before allowing the cell to continue the cell cycle. Thus, in some embodiments of the methods described herein, p53 is inhibited (e.g., by the p53 inhibitor protein “i53.” or another p53 inhibitor) to increase the efficiency of prime editing.

### PEgRNA

[0244] As used herein, the terms “prime editing guide RNA” or “PEgRNA” or “extended guide RNA” refer to a specialized form of a guide RNA that has been modified to include one or more additional sequences for implementing the prime editing methods and compositions described herein. As described herein, the prime editing guide RNA comprise one or more “extended regions” of nucleic acid sequence. The extended regions may comprise, but are not limited to, single-stranded RNA or DNA. Further, the extended regions may occur at the 3′ end of a traditional guide RNA. In other arrangements, the extended regions may occur at the 5′ end of a traditional guide RNA. In still other arrangements, the extended region may occur at an intramolecular region of the traditional guide RNA, for example, in the gRNA core region which associates and/or binds to the napDNAbp. The extended region comprises a “DNA synthesis template” which encodes (by the polymerase of the prime editor) a single-stranded DNA which, in turn, has been designed to be (a) homologous with the endogenous target DNA to be edited, and (b) which comprises at least one desired nucleotide change (e.g., a transition, a transversion, a deletion, or an insertion) to be introduced or integrated into the endogenous target DNA. The extended region may also comprise other functional sequence elements, such as, but not limited to, a “primer binding site” and a “spacer or linker” sequence, or other structural elements, such as, but not limited to aptamers, stem loops, hairpins, toe loops (e.g., a 3′ toeloop), or an RNA-protein recruitment domain (e.g., MS2 hairpin). As used herein the “primer binding site” comprises a sequence that hybridizes to a single-strand DNA sequence having a 3′end generated from the nicked DNA of the R-loop.

[0245] In certain embodiments, the PEgRNAs have a 5′ extension arm, a spacer, and a gRNA core. The 5′ extension further comprises in the 5′ to 3′ direction a reverse transcriptase template, a primer binding site, and a linker. The reverse transcriptase template may also be referred to more broadly as the “DNA synthesis template” where the polymerase of a prime editor described herein is not an RT, but another type of polymerase.

[0246] In certain other embodiments, the PEgRNAs have a 5′ extension arm, a spacer, and a gRNA core. The 5′ extension further comprises in the 5′ to 3′ direction a reverse transcriptase template, a primer binding site, and a linker. The reverse transcriptase template may also be referred to more broadly as the “DNA synthesis template” where the polymerase of a prime editor described herein is not an RT, but another type of polymerase.

[0247] In still other embodiments, the PEgRNAs have in the 5′ to 3′ direction a spacer (1), a gRNA core (2), and an extension arm (3). The extension arm (3) is at the 3′ end of the PEgRNA. The extension arm (3) further comprises in the 5′ to 3′ direction a “homology arm,” an “edit template.” and a “primer binding site.” In certain embodiments, a PEgRNA comprises from 5′ to 3′, a space, a DNA synthesis template, and a primer binding site. The extension arm (3) may also comprise an optional modifier region at the 3′ and 5′ ends, which may be the same sequences or different sequences. In addition, the 3′ end of the PEgRNA may comprise a transcriptional terminator sequence. These sequence elements of the PEgRNAs are further described and defined herein.

[0248] In still other embodiments, the PEgRNAs have in the 5′ to 3′ direction an extension arm (3), a spacer (1), and a gRNA core (2). The extension arm (3) is at the 5′ end of the PEgRNA. The extension arm (3) further comprises in the 3′ to 5′ direction a “homology arm,” an “edit template.” and a “primer binding site.” The extension arm (3) may also comprise an optional modifier region at the 3′ and 5′ ends, which may be the same sequences or different sequences. The PEgRNAs may also comprise a transcriptional terminator sequence at the 3′ end. These sequence elements of the PEgRNAs are further described and defined herein.

### PE1

[0249] As used herein, “PE1” refers to a prime editor system comprising a fusion protein comprising Cas9(H840A) and a wild type MMLV RT having the following structure: [NLS]-[Cas9(H840A)]-[linker]-[MMLV_RT(wt)]+a desired PEgRNA, wherein the PE fusion has the amino acid sequence of SEQ ID NO: 100, which is shown as follows;

(SEQ ID NO: 100)
MKRTADGSEFESPKKKRKVDKKYSIGLDIGTNSVGWAVITDEYKVPSKKF
KVLGNTDRHSIKKNLIGALLFDSGETAEATRLKRTARRRYTRRKNRICYL
QEIFSNEMAKVDDSFFHRLEESFLVEEDKKHERHPIFGNIVDEVAYHEKY
PTIYHLRKKLVDSTDKADLRLIYLALAHMIKERGHFLIEGDLNPDNSDVD
KLFIQLVQTYNQLFEENPINASGVDAKAILSARLSKSRRLENLIAQLPGE
KKNGLFGNLIALSLGLTPNEKSNFDLAEDAKLQLSKDTYDDDLDNLLAQI
GDQYADLFLAAKNLSDAILLSDILRVNTEITKAPLSASMIKRYDEHHQDL
TLLKALVRQQLPEKYKEIFFDQSKNGYAGYIDGGASQEEFYKFIKPILEK
MDGTEELLVKLNREDLLRKQRTEDNGSIPHQIHLGELHAILRRQEDFYPF
LKDNREKIEKILTFRIPYYVGPLARGNSRFAWMTRKSEETITPWNFEEVV
DKGASAQSFIERMTNFDKNLPNEKVLPKHSLLYEYFTVYNELTKVKYVTE
GMRKPAFLSGEQKKAIVDLLFKTNRKVTVKQLKEDYFKKIECFDSVEISG
VEDRFNASLGTYHDLLKIIKDKDFLDNEENEDILEDIVLTLTLFEDREMI
EERLKTYAHLFDDKVMKQLKRRRYTGWGRLSRKLINGIRDKQSGKTILDF
LKSDGFANRNFMQLIHDDSLTFKEDIQKAQVSGQGDSLHEHIANLAGSPA
IKKGILQTVKVVDELVKVMGRHKPENIVIEMARENQTTQKGQKNSRERMK
RIEEGIKELGSQILKEHPVENTQLQNEKLYLYYLQNGRDMYVDQELDINR
LSDYDVDAIVPQSFLKDDSIDNKVLTRSDKNRGKSDNVPSEEVVKKMKNY
WRQLLNAKLITQRKFDNLTKAERGGLSELDKAGFIKRQLVETRQITKHVA
QILDSRMNTKYDENDKLIREVKVITLKSKLVSDFRKDFQFYKVREINNYH
HAHDAYLNAVVGTALIKKYPKLESEFVYGDYKVYDVRKMIAKSEQEIGKA
TAKYFFYSNIMNFFKTEITLANGEIRKRPLIETNGETGEIVWDKGRDFAT
VRKVLSMPQVNIVKKTEVQTGGFSKESILPKRNSDKLIARKKDWDPKKYG
GFDSPTVAYSVLVVAKVEKGKSKKLKSVKELLGITIMERSSFEKNPIDFL
EAKGYKEVKKDLIIKLPKYSLFELENGRKRMLASAGELQKGNELALPSKY
VNFLYLASHYEKLKGSPEDNEQKQLFVEQHKHYLDEIIEQISEFSKRVIL
ADANLDKVLSAYNKHRDKPIREQAENIIHLFTLTNLGAPAAFKYFDTTID
RKRYTSTKEVLDATLIHQSITGLYETRIDLSQLGGDSGGSSGGSSGSETP
GTSESATPESSGGSSGGSSTLNIEDEYRLHETSKEPDVSLGSTWLSDFPQ
AWAETGGMGLAVRQAPLIIPLKATSTPVSIKQYPMSQEARLGIKPHIQRL
LDQGILVPCQSPWNTPLLPVKKPGTNDYRPVQDLREVNKRVEDIHPTVPN
PYNLLSGLPPSHQWYTVLDLKDAFFCLRLHPTSQPLFAFEWRDPEMGISG
QLTWTRLPQGFKNSPTLFDEALHRDLADFRIQHPDLILLQYVDDLLLAAT
SELDCQQGTRALLQTLGNLGYRASAKKAQICQKQVKYLGYLLKEGQRWLT
EARKETVMGQPTPKTPRQLREFLGTAGFCRLWIPGFAEMAAPLYPLTKTG
TLFNWGPDQQKAYQEIKQALLTAPALGLPDLTKPFELFVDEKQGYAKGVL
TQKLGPWRRPVAYLSKKLDPVAAGWPPCLRMVAAIAVLTKDAGKLTMGQP
LVILAPHAVEALVKQPPDRWLSNARMTHYQALLLDTDRVQFGPVVALNPA
TLLPLPEEGLQHNCLDILAEAHGTRPDLTDQPLPDADHTWYTDGSSLLQE
GQRKAGAAVTTETEVIWAKALPAGTSAQRAELIALTQALKMAEGKKLNVY
TDSRYAFATAHIHGEIYRRRGLLTSEGKEIKNKDEILALLKALFLPKRLS
IIHCPGHQKGHSAEARGNRMADQAARKAAITETPDTSTLLIENSSPSGGS
KRTADGSEFEPKKKRKV
KEY:
NUCLEAR LOCALIZATION SEQUENCE (NLS) TOP: (SEQ ID
NO: 101), BOTTOM: (SEQ ID NO: 103)
CAS9(H840A)(SEQ ID NO: 37)(SEQ ID NO: 37 corre-
sponds identically to SEQ ID NO: 2, except with an
H840A substitution)
33-AMINO ACID LINKER (SEQ ID NO: 102)
M-MLV reverse transcriptase (SEQ ID NO: 81).

[0250] Alternatively, PE1 may also refer to the prime editor fusion protein of SEQ ID NO: 100, i.e., without the pegRNA complexed thereto. PE1 may be complexed with a pegRNA during operation and/or use in prime editing.

### PE2

[0251] As used herein, “PE2” refers to a prime editing system comprising a fusion protein comprising Cas9(H840A) and a variant MMLV RT having the following structure: [NLS]-[Cas9(H840A)]-[linker]-[MMLV_RT(D200N)(T330P)(L603W)(T306K)(W313F)]+a desired PEgRNA, wherein the PE fusion has the amino acid sequence of SEQ ID NO: 107, which is shown as follows:

(SEQ ID NO: 107)
MKRTADGSEFESPKKKRKVDKKYSIGLDIGTNSVGWAVITDEYKVPSKKF
KVLGNTDRHSIKKNLIGALLFDSGETAEATRLKRTARRRYTRRKNRICYL
QEIFSNEMAKVDDSFFHRLEESFLVEEDKKHERHPIFGNIVDEVAYHEKY
PTIYHLRKKLVDSTDKADLRLIYLALAHMIKERGHFLIEGDLNPDNSDVD
KLFIQLVQTYNQLFEENPINASGVDAKAILSARLSKSRRLENLIAQLPGE
KKNGLFGNLIALSLGLTPNFKSNFDLAEDAKLQLSKDTYDDDLDNLLAQI
GDQYADLFLAAKNLSDAILLSDILRVNTEITKAPLSASMIKRYDEHHQDL
TLLKALVRQQLPEKYKEIFFDQSKNGYAGYIDGGASQEEFYKFIKPILEK
MDGTEELLVKLNREDLLRKQRTFDNGSIPHQIHLGELHAILRRQEDFYPF
LKDNREKIEKILTFRIPYYVGPLARGNSRFAWMTRKSEETITPWNFEEVV
DKGASAQSFIERMTNFDKNLPNEKVLPKHSLLYEYFTVYNELTKVKYVTE
GMRKPAFLSGEQKKAIVDLLFKTNRKVTVKQLKEDYFKKIECFDSVEISG
VEDRFNASLGTYHDLLKIIKDKDFLDNEENEDILEDIVLTLTLFEDREMI
EERLKTYAHLFDDKVMKQLKRRRYTGWGRLSRKLINGIRDKQSGKTILDF
LKSDGFANRNFMQLIHDDSLTFKEDIQKAQVSGQGDSLHEHIANLAGSPA
IKKGILQTVKVVDELVKVMGRHKPENIVIEMARENQTTQKGQKNSRERMK
RIEEGIKELGSQILKEHPVENTQLQNEKLYLYYLQNGRDMYVDQELDINR
LSDYDVDAIVPQSFLKDDSIDNKVLTRSDKNRGKSDNVPSEEVVKKMKNY
WRQLLNAKLITQRKFDNLTKAERGGLSELDKAGFIKRQLVETRQITKHVA
QILDSRMNTKYDENDKLIREVKVITLKSKLVSDFRKDFQFYKVREINNYH
HAHDAYLNAVVGTALIKKYPKLESEFVYGDYKVYDVRKMIAKSEQEIGKA
TAKYFFYSNIMNFFKTEITLANGEIRKRPLIETNGETGEIVWDKGRDFAT
VRKVLSMPQVNIVKKTEVQTGGFSKESILPKRNSDKLIARKKDWDPKKYG
GFDSPTVAYSVLVVAKVEKGKSKKLKSVKELLGITIMERSSFEKNPIDFL
EAKGYKEVKKDLIIKLPKYSLFELENGRKRMLASAGELQKGNELALPSKY
VNFLYLASHYEKLKGSPEDNEQKQLFVEQHKHYLDEHIEQISEFSKRVIL
ADANLDKVLSAYNKHRDKPIREQAENIIHLFTLTNLGAPAAFKYFDTTID
RKRYTSTKEVLDATLIHQSITGLYETRIDLSQLGGDSGGSSGGSSGSETP
GTSESATPESSGGSSGGSSTLNIEDEYRLHETSKEPDVSLGSTWLSDFPQ
AWAETGGMGLAVRQAPLIIPLKATSTPVSIKQYPMSQEARLGIKPHIQRL
LDQGILVPCQSPWNTPLLPVKKPGTNDYRPVQDLREVNKRVEDIHPTVPN
PYNLLSGLPPSHQWYTVLDLKDAFFCLRLHPTSQPLFAFEWRDPEMGISG
QLTWTRLPQGFKNSPTLFNEALHRDLADFRIQHPDLILLQYVDDLLLAAT
SELDCQQGTRALLQTLGNLGYRASAKKAQICQKQVKYLGYLLKEGQRWLT
EARKETVMGQPTPKTPRQLREFLGKAGFCRLFIPGFAEMAAPLYPLTKPG
TLFNWGPDQQKAYQEIKQALLTAPALGLPDLTKPFELFVDEKQGYAKGVL
TQKLGPWRRPVAYLSKKLDPVAAGWPPCLRMVAAIAVLTKDAGKLTMGQP
LVILAPHAVEALVKQPPDRWLSNARMTHYQALLLDTDRVQFGPVVALNPA
TLLPLPEEGLQHNCLDILAEAHGTRPDLTDQPLPDADHTWYTDGSSLLQE
GQRKAGAAVTTETEVIWAKALPAGTSAQRAELIALTQALKMAEGKKLNVY
TDSRYAFATAHIHGEIYRRRGWLTSEGKEIKNKDEILALLKALFLPKRLS
IIHCPGHQKGHSAEARGNRMADQAARKAAITETPDTSTLLIENSSPSGGS
KRTADGSEFEPKKKRKV
KEY:
NUCLEAR LOCALIZATION SEQUENCE (NLS) TOP: (SEQ ID
NO: 101), BOTTOM: (SEQ ID NO: 103)
CAS9(H840A)(SEQ ID NO: 37)
33-AMINO ACID LINKER (SEQ ID NO: 102)
M-MLV reverse transcriptase (SEQ ID NO: 98).

[0252] Alternatively, PE2 may also refer to the prime editor fusion protein of SEQ ID NO: 107, i.e., without the pegRNA complexed thereto. PE2 may be complexed with a pegRNA during operation and/or use in prime editing.

### PE3

[0253] As used herein, “PE3” refers to PE2 plus a second-strand nicking guide RNA that complexes with the PE2 and introduces a nick in the non-edited DNA strand in order to induce preferential replacement of the edited strand.

### PE3b

[0254] As used herein. “PE3b” refers to PE3 but wherein the second-strand nicking guide RNA is designed for temporal control such that the second strand nick is not introduced until after the installation of the desired edit. This is achieved by designing a gRNA with a spacer sequence that matches only the edited strand, but not the original allele. Using this strategy, referred to hereafter as PE3b, mismatches between the protospacer and the unedited allele should disfavor nicking by the sgRNA until after the editing event on the PAM strand takes place.

### PE4

[0255] As used herein, “PE4” refers to a system comprising PE2 plus an MLH1 dominant negative protein (i.e., wild-type MLH1 with amino acids 754-756 truncated as described further herein) expressed in trans. In some embodiments, PE4 refers to a fusion protein comprising PE2 and an MLH1 dominant negative protein joined via an optional linker.

### PE5

[0256] As used herein, “PE5” refers to a system comprising PE3 plus an MLH1 dominant negative protein (i.e., wild-type MLH1 with amino acids 754-756 deleted as described further herein, which may be referred to as “MLH1 Δ754-756” or “MLH1dn”) expressed in trans. In some embodiments, PE5 refers to a fusion protein comprising PE3 and an MLH1 dominant negative protein joined via an optional linker.

### PEmax

[0257] As used herein, “PEmax” (see FIG. 54B) refers to a PE complex comprising a fusion protein comprising Cas9(R221K N394K H840A) and a variant MMLV RT pentamutant (D200N T306K W313F T330P L603W) having the following structure: [bipartite NLS]-[Cas9(R221K)(N394K)(H840A)]-[linker]-[MMLV_RT(D200N)(T330P)(L603W)]-[bipartite NLS]-[NLS]+a desired PEgRNA, wherein the PE fusion has the amino acid sequence of SEQ ID NO: 99.

### PE4max

[0258] As used herein. “PE4max” refers to PE4 but wherein the PE2 component is substituted with PEmax.

### PE5max

[0259] As used herein, “PE5max” refers to PE5 but wherein the PE2 component of PE3 is substituted with PEmax.

### PE-short

[0260] As used herein, “PE-short” refers to a PE construct that is fused to a C-terminally truncated reverse transcriptase, and has the following amino acid sequence:

(SEQ ID NO: 117)
MKRTADGSEFESPKKKRKVDKKYSIGLDIGTNSVGWAVITDEYKVPSKKF
KVLGNTDRHSIKKNLIGALLFDSGETAEATRLKRTARRRYTRRKNRICYL
QEIFSNEMAKVDDSFFHRLEESFLVEEDKKHERHPIFGNIVDEVAYHEKY
PTIYHLRKKLVDSTDKADLRLIYLALAHMIKFRGHFLIEGDLNPDNSDVD
KLFIQLVQTYNQLFEENPINASGVDAKAILSARLSKSRRLENLIAQLPGE
KKNGLFGNLIALSLGLTPNFKSNFDLAEDAKLQLSKDTYDDDLDNLLAQI
GDQYADLFLAAKNLSDAILLSDILRVNTEITKAPLSASMIKRYDEHHQDL
TLLKALVRQQLPEKYKEIFFDQSKNGYAGYIDGGASQEEFYKFIKPILEK
MDGTEELLVKLNREDLLRKQRTFDNGSIPHQIHLGELHAILRRQEDFYPF
LKDNREKIEKILTFRIPYYVGPLARGNSRFAWMTRKSEETITPWNFEEVV
DKGASAQSFIERMTNFDKNLPNEKVLPKHSLLYEYFTVYNELTKVKYVTE
GMRKPAFLSGEQKKAIVDLLFKTNRKVTVKQLKEDYFKKIECFDSVEISG
VEDRENASLGTYHDLLKIIKDKDFLDNEENEDILEDIVLTLTLFEDREMI
EERLKTYAHLEDDKVMKQLKRRRYTGWGRLSRKLINGIRDKQSGKTILDF
LKSDGFANRNFMQLIHDDSLTFKEDIQKAQVSGQGDSLHEHIANLAGSPA
IKKGILQTVKVVDELVKVMGRHKPENIVIEMARENQTTQKGQKNSRERMK
RIEEGIKELGSQILKEHPVENTQLQNEKLYLYYLQNGRDMYVDQELDINR
LSDYDVDAIVPQSFLKDDSIDNKVLTRSDKNRGKSDNVPSEEVVKKMKNY
WRQLLNAKLITQRKEDNLTKAERGGLSELDKAGFIKRQLVETRQITKHVA
QILDSRMNTKYDENDKLIREVKVITLKSKLVSDFRKDFQFYKVREINNYH
HAHDAYLNAVVGTALIKKYPKLESEFVYGDYKVYDVRKMIAKSEQEIGKA
TAKYFFYSNIMNFFKTEITLANGEIRKRPLIETNGETGEIVWDKGRDFAT
VRKVLSMPQVNIVKKTEVQTGGFSKESILPKRNSDKLIARKKDWDPKKYG
GFDSPTVAYSVLVVAKVEKGKSKKLKSVKELLGITIMERSSFEKNPIDFL
EAKGYKEVKKDLIIKLPKYSLFELENGRKRMLASAGELQKGNELALPSKY
VNFLYLASHYEKLKGSPEDNEQKQLEVEQHKHYLDEIIEQISEFSKRVIL
ADANLDKVLSAYNKHRDKPIREQAENIIHLFTLTNLGAPAAFKYFDTTID
RKRYTSTKEVLDATLIHQSITGLYETRIDLSQLGGDSGGSSGGSSGSETP
GTSESATPESSGGSSGGSSTLNIEDEYRLHETSKEPDVSLGSTWLSDFPQ
AWAETGGMGLAVRQAPLIIPLKATSTPVSIKQYPMSQEARLGIKPHIQRL
LDQGILVPCQSPWNTPLLPVKKPGTNDYRPVQDLREVNKRVEDIHPTVPN
PYNLLSGLPPSHQWYTVLDLKDAFFCLRLHPTSQPLFAFEWRDPEMGISG
QLTWTRLPQGFKNSPTLFNEALHRDLADFRIQHPDLILLQYVDDLLLAAT
SELDCQQGTRALLQTLGNLGYRASAKKAQICQKQVKYLGYLLKEGQRWLT
EARKETVMGQPTPKTPRQLREFLGKAGFCRLFIPGFAEMAAPLYPLTKPG
TLFNWGPDQQKAYQEIKQALLTAPALGLPDLTKPFELFVDEKQGYAKGVL
TQKLGPWRRPVAYLSKKLDPVAAGWPPCLRMVAAIAVLTKDAGKLTMGQP
LVILAPHAVEALVKQPPDRWLSNARMTHYQALLLDTDRVQFGPVVALNPA
TLLPLPEEGLQHNCLDNSRLINSGGSKRTADGSEFEPKKKRKV
KEY:
NUCLEAR LOCALIZATION SEQUENCE (NLS) TOP: (SEQ ID
NO: 101), BOTTOM: (SEQ ID NO: 103)
CAS9(H840A)(SEQ ID NO: 37)
33-AMINO ACID LINKER 1 (SEQ ID NO: 102)
M-MLV TRUNCATED reverse transcriptase (SEQ ID NO:
80)

### Polymerase

[0261] As used herein, the term “polymerase” refers to an enzyme that synthesizes a nucleotide strand and that may be used in connection with the prime editor systems described herein. The polymerase can be a “template-dependent” polymerase (i.e., a polymerase that synthesizes a nucleotide strand based on the order of nucleotide bases of a template strand). The polymerase can also be a “template-independent” polymerase (i.e., a polymerase that synthesizes a nucleotide strand without the requirement of a template strand). A polymerase may also be further categorized as a “DNA polymerase” or an “RNA polymerase.” In various embodiments, the prime editor system comprises a DNA polymerase. In various embodiments, the DNA polymerase can be a “DNA-dependent DNA polymerase” (i.e., whereby the template molecule is a strand of DNA). In such cases, the DNA template molecule can be a PEgRNA, wherein the extension arm comprises a strand of DNA. In such cases, the PEgRNA may be referred to as a chimeric or hybrid PEgRNA which comprises an RNA portion (i.e., the guide RNA components, including the spacer and the gRNA core) and a DNA portion (i.e., the extension arm). In various other embodiments, the DNA polymerase can be an “RNA-dependent DNA polymerase” (i.e., whereby the template molecule is a strand of RNA). In such cases, the PEgRNA is RNA, i.e., including an RNA extension. The term “polymerase” may also refer to an enzyme that catalyzes the polymerization of nucleotide (i.e., the polymerase activity). Generally, the enzyme will initiate synthesis at the 3′-end of a primer annealed to a polynucleotide template sequence (e.g., such as a primer sequence annealed to the primer binding site of a PEgRNA) and will proceed toward the 5′ end of the template strand. A “DNA polymerase” catalyzes the polymerization of deoxynucleotides. As used herein in reference to a DNA polymerase, the term DNA polymerase includes a “functional fragment thereof.” A “functional fragment thereof” refers to any portion of a wild-type or mutant DNA polymerase that encompasses less than the entire amino acid sequence of the polymerase and which retains the ability, under at least one set of conditions, to catalyze the polymerization of a polynucleotide. Such a functional fragment may exist as a separate entity, or it may be a constituent of a larger polypeptide, such as a fusion protein.

### Prime Editing

[0262] As used herein, the term “prime editing” refers to an approach for gene editing using napDNAbps, a polymerase (e.g., a reverse transcriptase), and specialized guide RNAs that include a DNA synthesis template for encoding desired new genetic information (or deleting genetic information) that is then incorporated into a target DNA sequence. Certain embodiments of prime editing are described in the embodiments of FIG. 1. Classical prime editing is described in the inventors' publication of Anzalone, A. V. et al. Search-and-replace genome editing without double-strand breaks or donor DNA. Nature 576, 149-157 (2019), which is incorporated herein by reference in its entirety.

[0263] Prime editing represents a platform for genome editing that is a versatile and precise genome editing method that directly writes new genetic information into a specified DNA site using a nucleic acid programmable DNA binding protein (“napDNAbp”) working in association with a polymerase (i.e., in the form of a fusion protein or otherwise provided in trans with the napDNAbp), wherein the prime editing system is programmed with a prime editing (PE) guide RNA (“PEgRNA”) that both specifies the target site and templates the synthesis of the desired edit in the form of a replacement DNA strand by way of an extension (either DNA or RNA) engineered onto a guide RNA (e.g., at the 5′ or 3′ end, or at an internal portion of a guide RNA). The replacement strand containing the desired edit (e.g., a single nucleobase substitution) shares the same (or is homologous to) sequence as the endogenous strand (immediately downstream of the nick site) of the target site to be edited (with the exception that it includes the desired edit). Through DNA repair and/or replication machinery, the endogenous strand downstream of the nick site is replaced by the newly synthesized replacement strand containing the desired edit. In some cases, prime editing may be thought of as a “search-and-replace” genome editing technology since the prime editors, as described herein, not only search and locate the desired target site to be edited, but at the same time, encode a replacement strand containing a desired edit which is installed in place of the corresponding target site endogenous DNA strand. The prime editors of the present disclosure relate, in part, to the mechanism of target-primed reverse transcription (TPRT), which can be engineered for conducting precision CRISPR/Cas-based genome editing with high efficiency and genetic flexibility. TPRT is used by mobile DNA elements, such as mammalian non-LTR retrotransposons and bacterial Group II introns. The inventors have herein used Cas protein-reverse transcriptase fusions or related systems to target a specific DNA sequence with a guide RNA, generate a single strand nick at the target site, and use the nicked DNA as a primer for reverse transcription of an engineered reverse transcriptase template that is integrated with the guide RNA. However, while the concept begins with prime editors that use reverse transcriptase as the DNA polymerase component, the prime editors described herein are not limited to reverse transcriptases but may include the use of virtually any DNA polymerase. Indeed, while the application throughout may refer to prime editors with “reverse transcriptases,” it is set forth here that reverse transcriptases are only one type of DNA polymerase that may work with prime editing. Thus, wherever the specification mentions a “reverse transcriptase,” the person having ordinary skill in the art should appreciate that any suitable DNA polymerase may be used in place of the reverse transcriptase. Thus, in one aspect, the prime editors may comprise Cas9 (or an equivalent napDNAbp) which is programmed to target a DNA sequence by associating it with a specialized guide RNA (i.e., PEgRNA) containing a spacer sequence that anneals to a complementary protospacer in the target DNA. The specialized guide RNA also contains new genetic information in the form of an extension that encodes a replacement strand of DNA containing a desired genetic alteration which is used to replace a corresponding endogenous DNA strand at the target site. To transfer information from the PEgRNA to the target DNA, the mechanism of prime editing involves nicking the target site in one strand of the DNA to expose a 3′-hydroxyl group. The exposed Y-hydroxyl group can then be used to prime the DNA polymerization of the edit-encoding extension on PEgRNA directly into the target site. In various embodiments, the extension—which provides the template for polymerization of the replacement strand containing the edit—can be formed from RNA or DNA. In the case of an RNA extension, the polymerase of the prime editor can be an RNA-dependent DNA polymerase (such as, a reverse transcriptase). In the case of a DNA extension, the polymerase of the prime editor may be a DNA-dependent DNA polymerase. The newly synthesized strand (i.e., the replacement DNA strand containing the desired edit) that is formed by the herein disclosed prime editors would be homologous to the genomic target sequence (i.e., have the same sequence as) except for the inclusion of a desired nucleotide change (e.g., a single nucleotide change, a deletion, or an insertion, or a combination thereof). The newly synthesized (or replacement) strand of DNA may also be referred to as a single strand DNA flap, which would compete for hybridization with the complementary homologous endogenous DNA strand, thereby displacing the corresponding endogenous strand. In certain embodiments, the system can be combined with the use of an error-prone reverse transcriptase enzyme (e.g., provided as a fusion protein with the Cas9 domain, or provided in trans to the Cas9 domain). The error-prone reverse transcriptase enzyme can introduce alterations during synthesis of the single strand DNA flap. Thus, in certain embodiments, error-prone reverse transcriptase can be utilized to introduce nucleotide changes to the target DNA. Depending on the error-prone reverse transcriptase that is used with the system, the changes can be random or non-random. Resolution of the hybridized intermediate (comprising the single strand DNA flap synthesized by the reverse transcriptase hybridized to the endogenous DNA strand) can include removal of the resulting displaced flap of endogenous DNA (e.g., with a 5′ end DNA flap endonuclease, FEN1), ligation of the synthesized single strand DNA flap to the target DNA, and assimilation of the desired nucleotide change as a result of cellular DNA repair and/or replication processes. Because templated DNA synthesis offers single nucleotide precision for the modification of any nucleotide, including insertions and deletions, the scope of this approach is very broad and could foreseeably be used for myriad applications in basic science and therapeutics.

[0264] In various embodiments, prime editing operates by contacting a target DNA molecule (for which a change in the nucleotide sequence is desired to be introduced) with a nucleic acid programmable DNA binding protein (napDNAbp) complexed with a prime editing guide RNA (PEgRNA). In various embodiments, the prime editing guide RNA (PEgRNA) comprises an extension at the 3′ or 5′ end of the guide RNA, or at an intramolecular location in the guide RNA and encodes the desired nucleotide change (e.g., single nucleotide change, insertion, or deletion). In step (a), the napDNAbp/extended gRNA complex contacts the DNA molecule, and the extended gRNA guides the napDNAbp to bind to a target locus. In step (b), a nick in one of the strands of DNA of the target locus is introduced (e.g., by a nuclease or chemical agent), thereby creating an available 3′ end in one of the strands of the target locus. In certain embodiments, the nick is created in the strand of DNA that corresponds to the R-loop strand, i.e., the strand that is not hybridized to the guide RNA sequence, i.e., the “non-target strand.” The nick, however, could be introduced in either of the strands. That is, the nick could be introduced into the R-loop “target strand” (i.e., the strand hybridized to the protospacer of the extended gRNA) or the “non-target strand” (i.e., the strand forming the single-stranded portion of the R-loop and which is complementary to the target strand). In step (c), the 3′ end of the DNA strand (formed by the nick) interacts with the extended portion of the guide RNA in order to prime reverse transcription (i.e., “target-primed RT”). In certain embodiments, the 3′ end DNA strand hybridizes to a specific RT priming sequence on the extended portion of the guide RNA, i.e., the “reverse transcriptase priming sequence” or “primer binding site” on the PEgRNA. In step (d), a reverse transcriptase (or other suitable DNA polymerase) is introduced which synthesizes a single strand of DNA from the 3′ end of the primed site towards the 5′ end of the prime editing guide RNA. The DNA polymerase (e.g., reverse transcriptase) can be fused to the napDNAbp or alternatively can be provided in trans to the napDNAbp. This forms a single-strand DNA flap comprising the desired nucleotide change (e.g., the single base change, insertion, or deletion, or a combination thereof) and which is otherwise homologous to the endogenous DNA at or adjacent to the nick site. In step (e), the napDNAbp and guide RNA are released. Steps (f) and (g) relate to the resolution of the single strand DNA flap such that the desired nucleotide change becomes incorporated into the target locus. This process can be driven towards the desired product formation by removing the corresponding 5′ endogenous DNA flap that forms once the 3′ single strand DNA flap invades and hybridizes to the endogenous DNA sequence. Without being bound by theory, the cells endogenous DNA repair and replication processes resolves the mismatched DNA to incorporate the nucleotide change(s) to form the desired altered product. The process can also be driven towards product formation with “second strand nicking.” This process may introduce at least one or more of the following genetic changes: transversions, transitions, deletions, and insertions.

[0265] The term “prime editor (PE) system” or “prime editor (PE)” or “PE system” or “PE editing system” refers the compositions involved in the method of genome editing using target-primed reverse transcription (TPRT) describe herein, including, but not limited to the napDNAbps, reverse transcriptases (or another DNA polymerase), fusion proteins (e.g., comprising napDNAbps and reverse transcriptases or comprising napDNAbps and DNA polymerases), prime editing guide RNAs, and complexes comprising fusion proteins and prime editing guide RNAs, as well as accessory elements, such as second strand nicking components (e.g., second strand sgRNAs) and 5′ endogenous DNA flap removal endonucleases (e.g., FEN1) for helping to drive the prime editing process towards the edited product formation.

[0266] Although in the embodiments described thus far the PEgRNA constitutes a single molecule comprising a guide RNA (which itself comprises a spacer sequence and a gRNA core or scaffold) and a 5′ or 3′ extension arm comprising the primer binding site and a DNA synthesis template, the PEgRNA may also take the form of two individual molecules comprised of a guide RNA and a trans prime editor RNA template (tPERT), which essentially houses the extension arm (including, in particular, the primer binding site and the DNA synthesis domain) and an RNA-protein recruitment domain (e.g., MS2 aptamer or hairpin) in the same molecule which becomes co-localized or recruited to a modified prime editor complex that comprises a tPERT recruiting protein (e.g., MS2cp protein, which binds to the MS2 aptamer).

### Prime Editor

[0267] The term “prime editor” refers to fusion constructs comprising a napDNAbp (e.g., Cas9 nickase) and a reverse transcriptase and is capable of carrying out prime editing on a target nucleotide sequence in the presence of a PEgRNA (or “extended guide RNA”). The term “prime editor” may refer to the fusion protein or to the fusion protein complexed with a PEgRNA, and/or further complexed with a second-strand nicking sgRNA. In some embodiments, the prime editor may also refer to the complex comprising a fusion protein (reverse transcriptase fused to a napDNAbp), a PEgRNA, and a regular guide RNA capable of directing the second-site nicking step of the non-edited strand as described herein. In certain embodiments, a prime editor (e.g., PE1, PE2, or PE3) may be provided as a system along with an inhibitor of the DNA mismatch repair pathway, such as a dominant negative MLH1 protein. In various embodiments, the inhibitor of the DNA mismatch repair pathway, such as a dominant negative MLH1 protein, may be provided in trans to the prime editor. In other embodiments, the inhibitor of the DNA mismatch repair pathway, such as a dominant negative MLH1 protein, may be complexed to the prime editor, e.g., coupled through a linker to the prime editor fusion protein.

### Primer Binding Site

[0268] The term “primer binding site” or “the PBS” refers to the portion of a PEgRNA as a component of the extension arm (for example, at the 3′ end of the extension arm). The term “primer binding site” refers to a single-stranded portion of the PEgRNA as a component of the extension arm that comprises a region of complementarity to a sequence on the non-target strand. In some embodiments, the primer binding site is complementary to a region upstream of a nick site in a non-target strand. In some embodiments, the primer binding site is complementary to a region immediately upstream of a nick site in the non-target strand. In some embodiments, the primer binding site is capable of binding to the primer sequence that is formed after nicking (e.g., by a nickase component of a prime editor, for example, a Cas9 nikcase) of the target sequence by the prime editor. When a prime editor nicks one strand of the target DNA sequence (e.g., by a Cas nickase component of the prime editor), a 3′-ended ssDNA flap is formed, which serves a primer sequence that anneals to the primer binding site on the PEgRNA to prime reverse transcription. In some embodiments, the PBS is complementary to, or substantially complementary to, and can anneal to, a free 3′ end on the non-target strand of the double stranded target DNA at the nick site. In some embodiments, the PBS annealed to the free 3′ end on the non-target strand can initiate target-primed DNA synthesis.

### Protospacer

[0269] As used herein, the term “protospacer” refers to the sequence (˜20 bp) in DNA adjacent to the PAM (protospacer adjacent motif) sequence. The protospacer shares the same sequence as the spacer sequence of the guide RNA. The guide RNA anneals to the complement of the protospacer sequence on the target DNA (specifically, one strand thereof, i.e., the “target strand” versus the “non-target strand” of the target DNA sequence). In some embodiments, in order for a Cas nickase component of the prime editor to function it also requires a specific protospacer adjacent motif (PAM) which varies depending on the Cas protein component itself, e.g., the type of Cas protein. For example, the most commonly used Cas9 nuclease, derived from S. pyogenes, recognizes a PAM sequence of NGG that is found directly downstream of the target sequence in the genomic DNA, on the non-target strand. The skilled person will appreciate that the literature in the state of the art sometimes refers to the “protospacer” as the ˜20-nt target-specific guide sequence on the guide RNA itself, rather than referring to it as a “spacer.” Thus, in some cases, the term “protospacer” as used herein may be used interchangeably with the term “spacer.” The context of the description surrounding the appearance of either “protospacer” or “spacer” will help inform the reader as to whether the term is in reference to the gRNA or the DNA target.

### Protospacer Adjacent Motif (PAM)

[0270] As used herein, the term “protospacer adjacent sequence” or “PAM” refers to an approximately 2-6 base pair DNA sequence that is an important targeting component of a Cas9 nuclease. Typically, the PAM sequence is on either strand, and is downstream in the 5′ to 3′ direction of the Cas9 cut site. The canonical PAM sequence (i.e., the PAM sequence that is associated with the Cas9 nuclease of Streptococcus pyogenes or SpCas9) is 5′-NGG-3′ wherein “N” is any nucleobase followed by two guanine (“G”) nucleobases. Different PAM sequences can be associated with different Cas9 nucleases or equivalent proteins from different organisms. In addition, any given Cas9 nuclease, e.g., SpCas9, may be modified to alter the PAM specificity of the nuclease such that the nuclease recognizes alternative PAM sequence.

[0271] For example, with reference to the canonical SpCas9 amino acid sequence is SEQ ID NO: 2, the PAM sequence can be modified by introducing one or more mutations, including (a) D1135V, R1335Q, and T1337R “the VQR variant”, which alters the PAM specificity to NGAN or NGNG, (b) D1135E, R1335Q, and T1337R “the EQR variant”, which alters the PAM specificity to NGAG, and (c) D1135V, G1218R, R1335E, and T1337R “the VRER variant”, which alters the PAM specificity to NGCG. In addition, the D1135E variant of canonical SpCas9 still recognizes NGG, but it is more selective compared to the wild type SpCas9 protein.

[0272] It will also be appreciated that Cas9 enzymes from different bacterial species (i.e., Cas9 orthologs) can have varying PAM specificities. For example, Cas9 from Staphylococcus aureus (SaCas9) recognizes NGRRT or NGRRN. In addition, Cas9 from Neisseria meningitis (NmCas) recognizes NNNNGATT. In another example, Cas9 from Streptococcus thermophilis (StCas9) recognizes NNAGAAW. In still another example, Cas9 from Treponema denticola (TdCas) recognizes NAAAAC. These are examples and are not meant to be limiting. It will be further appreciated that non-SpCas9s bind a variety of PAM sequences, which makes them useful when no suitable SpCas9 PAM sequence is present at the desired target cut site. Furthermore, non-SpCas9s may have other characteristics that make them more useful than SpCas9. For example, Cas9 from Staphylococcus aureus (SaCas9) is about 1 kilobase smaller than SpCas9, so it can be packaged into adeno-associated virus (AAV). Further reference may be made to Shah et al., “Protospacer recognition motifs: mixed identities and functional diversity,” RNA Biology, 10(5): 891-899 (which is incorporated herein by reference).

### Reverse Transcriptase

[0273] The term “reverse transcriptase” describes a class of polymerases characterized as RNA-dependent DNA polymerases. All known reverse transcriptases require a primer to synthesize a DNA transcript from an RNA template. Historically, reverse transcriptase has been used primarily to transcribe mRNA into cDNA which can then be cloned into a vector for further manipulation. Avian myoblastosis virus (AMV) reverse transcriptase was the first widely used RNA-dependent DNA polymerase (Verma, Biochim. Biophys. Acta 473:1(1977)). The enzyme has 5′-3′ RNA-directed DNA polymerase activity, 5′-3′ DNA-directed DNA polymerase activity, and RNase H activity. RNase H is a processive 5′ and 3′ ribonuclease specific for the RNA strand for RNA-DNA hybrids (Perbal, A Practical Guide to Molecular Cloning, New York: Wiley & Sons (1984)). Errors in transcription cannot be corrected by reverse transcriptase because known viral reverse transcriptases lack the 3′-5′ exonuclease activity necessary for proofreading (Saunders and Saunders, Microbial Genetics Applied to Biotechnology, London: Croom Helm (1987)). A detailed study of the activity of AMV reverse transcriptase and its associated RNase H activity has been presented by Berger et al., Biochemistry 22:2365-2372 (1983). Another reverse transcriptase which is used extensively in molecular biology is reverse transcriptase originating from Moloney murine leukemia virus (M-MLV). See, e.g., Gerard, G. R., DNA 5:271-279 (1986) and Kotewicz, M. L., et al., Gene 35:249-258 (1985). M-MLV reverse transcriptase substantially lacking in RNase H activity has also been described. See, e.g., U.S. Pat. No. 5,244,797. The invention contemplates the use of any such reverse transcriptases, or variants or mutants thereof.

[0274] In addition, the invention contemplates the use of reverse transcriptases that are error-prone, i.e., that may be referred to as error-prone reverse transcriptases or reverse transcriptases that do not support high fidelity incorporation of nucleotides during polymerization. During synthesis of the single-strand DNA flap based on the RT template integrated with the guide RNA, the error-prone reverse transcriptase can introduce one or more nucleotides which are mismatched with the RT template sequence, thereby introducing changes to the nucleotide sequence through erroneous polymerization of the single-strand DNA flap. These errors introduced during synthesis of the single strand DNA flap then become integrated into the double strand molecule through hybridization to the corresponding endogenous target strand, removal of the endogenous displaced strand, ligation, and then through one more round of endogenous DNA repair and/or sequencing processes.

### Reverse Transcription

[0275] As used herein, the term “reverse transcription” indicates the capability of an enzyme to synthesize a DNA strand (that is, complementary DNA or cDNA) using RNA as a template. In some embodiments, the reverse transcription can be “error-prone reverse transcription,” which refers to the properties of certain reverse transcriptase enzymes which are error-prone in their DNA polymerization activity.

### Protein, Peptide, and Polypeptide

[0276] The terms “protein,” “peptide.” and “polypeptide” are used interchangeably herein, and refer to a polymer of amino acid residues linked together by peptide (amide) bonds. The terms refer to a protein, peptide, or polypeptide of any size, structure, or function. Typically, a protein, peptide, or polypeptide will be at least three amino acids long. A protein, peptide, or polypeptide may refer to an individual protein or a collection of proteins. One or more of the amino acids in a protein, peptide, or polypeptide may be modified, for example, by the addition of a chemical entity such as a carbohydrate group, a hydroxyl group, a phosphate group, a famesyl group, an isofarnesyl group, a fatty acid group, a linker for conjugation, functionalization, or other modification, etc. A protein, peptide, or polypeptide may also be a single molecule or may be a multi-molecular complex. A protein, peptide, or polypeptide may be just a fragment of a naturally occurring protein or peptide. A protein, peptide, or polypeptide may be naturally occurring, recombinant, or synthetic, or any combination thereof. Any of the proteins provided herein may be produced by any method known in the art. For example, the proteins provided herein may be produced via recombinant protein expression and purification, which is especially suited for fusion proteins comprising a peptide linker. Methods for recombinant protein expression and purification are well known, and include those described by Green and Sambrook, Molecular Cloning: A Laboratory Manual ⁽⁴th ed., Cold Spring Harbor Laboratory Press, Cold Spring Harbor. N.Y. (2012)), the entire contents of which are incorporated herein by reference.

### Silent Mutation

[0277] As used herein, the term “silent mutation” refers to a mutation in a nucleic acid molecule that does not have an effect on the phenotype of the nucleic acid molecule, or the protein it produces if it encodes a protein. Silent mutations can be present in coding regions of a nucleic acid (i.e., segments of a gene that encode for a protein), or they can be present in non-coding regions of a nucleic acid. A silent mutation in a nucleic acid sequence, e.g., in a target DNA sequence or in a DNA synthesis template sequence to be installed in the target sequence, may be a nucleotide alteration that does not result in expression or function of the amino acid sequence encoded by the nucleic acid sequence, or other functional features of the target nucleic acid sequence. When silent mutations are present in a coding region, they may be synonymous mutations. Synonymous mutations refer to substitutions of one base for another in a gene such that the corresponding amino acid residue of the protein produced by the gene is not modified. This is due to the redundancy of the genetic code, allowing for multiple different codons to encode for the same amino acid in a particular organism. When a silent mutation is in a non-coding region or a junction of a coding region and a non-coding region (e.g., an intron/exon junction), it may be in a region that does not impact any biological properties of the nucleic acid molecule (e.g., splicing, gene regulation, RNA lifetime, etc.). Silent mutations may be useful, for example, for increasing the length of an edit made to a target nucleotide sequence using prime editing to evade correction of the edit by the MMR pathway as described herein. In certain embodiments, the number of silent mutations installed may be one, or two, or three, or four, or five, or six, or seven, or eight, or nine, or ten, or more. In certain other embodiments involving at least two silent mutations, the silent mutations may be installed within one, or two, or three, or four, or five, or six, or seven, or eight, or nine, or ten, or 11, 12, 13, 14, 15, 16, 17, 18, 19, 20, 21, 22, 23, 24, or 25 nucleotides from the intended edit site.

### Spacer Sequence

[0278] As used herein, the term “spacer sequence” in connection with a guide RNA or a PEgRNA refers to the portion of the guide RNA or PEgRNA of about 20 nucleotides (e.g., 16, 17, 18, 19, 20, 21, 22, 23 or 24 nucleotides) which contains a nucleotide sequence that shares the same sequence as the protospacer sequence in the target DNA sequence. The spacer sequence anneals to the complement of the protospacer sequence to form a ssRNA/ssDNA hybrid structure at the target site and a corresponding R loop ssDNA structure of the endogenous DNA strand.

### Target Site

[0279] The term “target site” refers to a sequence within a nucleic acid molecule to be edited by a prime editor (PE) disclosed herein. The target site may refer to the endogenous sequence within the nucleic acid molecule to be edited, e.g., endogenous genomic sequence of a target genome, which is identical to the sequence of the DNA synthesis template except for the one or more nucleotide edits to be installed present on the DNA synthesis template (and except that the DNA synthesis template contains Uracil instead of Thymine), or the corresponding endogenous sequence on the non-target strand that is complementary to the DNA synthesis template except for one or more mismatches at the position of the one or more nucleotide edits to be installed present on the DNA synthesis template. The target site may also further refer to the sequence within a nucleic acid molecule to which a complex of the prime editor (PE) and gRNA binds.

### Variant

[0280] As used herein the term “variant” should be taken to mean the exhibition of qualities that have a pattern that deviates from what occurs in nature. e.g., a variant Cas9 is a Cas9 comprising one or more changes in amino acid residues as compared to a wild type Cas9 amino acid sequence. The term “variant” encompasses homologous proteins having at least 75%, or at least 80%, or at least 85%, or at least 90%, or at least 95%, or at least 99% percent identity with a reference sequence and having the same or substantially the same functional activity or activities as the reference sequence. The term also encompasses mutants, truncations, or domains of a reference sequence, and which display the same or substantially the same functional activity or activities as the reference sequence.

### Vector

[0281] The term “vector,” as used herein, refers to a nucleic acid that can be modified to encode a gene of interest and that is able to enter into a host cell, mutate and replicate within the host cell, and then transfer a replicated form of the vector into another host cell. Exemplary suitable vectors include viral vectors, such as retroviral vectors or bacteriophages and filamentous phage, and conjugative plasmids. Additional suitable vectors will be apparent to those of skill in the art based on the instant disclosure.

### DETAILED DESCRIPTION OF CERTAIN EMBODIMENTS

[0282] The present disclosure provides compositions and methods for prime editing with improved editing efficiency and/or reduced indel formation by inhibiting the DNA mismatch repair pathway while conducting prime editing of a target site. The inventors have surprisingly found that the editing efficiency of prime editing may be significantly increased (e.g., 2-fold increase, 3-fold increase, 4-fold increase, 5-fold increase, 6-fold increase, 7-fold increase, 8-fold increase, 9-fold increase, 10-fold increase, 1l-fold increase, 12-fold increase, 13-fold increase, 14-fold increase, 15-fold increase, 16-fold increase, 17-fold increase, 18-fold increase, 19-fold increase, 20-fold increase, 21-fold increase, 22-fold increase, 23-fold increase, 24-fold increase, 26-fold increase, 27-fold increase, 28-fold increase, 29-fold increase, 30-fold increase, 31-fold increase, 32-fold increase, 33-fold increase, 34-fold increase, 35-fold increase, 36-fold increase, 37-fold increase, 38-fold increase, 39-fold increase, 40-fold increase 0.41-fold increase, 42-fold increase, 43-fold increase, 44-fold increase, 45-fold increase, 46-fold increase, 47-fold increase, 48-fold increase, 49-fold increase, 50-fold increase, 51-fold increase, 52-fold increase, 53-fold increase, 54-fold increase, 55-fold increase, 56-fold increase, 57-fold increase, 58-fold increase, 59-fold increase, 60-fold increase, 61-fold increase, 62-fold increase, 63-fold increase, 64-fold increase, 65-fold increase, 66-fold increase, 67-fold increase, 68-fold increase, 69-fold increase, 70-fold increase, 71-fold increase, 72-fold increase, 73-fold increase, 74-fold increase, 75-fold increase, 76-fold increase, 77-fold increase, 78-fold increase, 79-fold increase, 80-fold increase, 81-fold increase, 82-fold increase, 83-fold increase, 84-fold increase, 85-fold increase, 86-fold increase, 87-fold increase, 88-fold increase, 89-fold increase, 90-fold increase, 91-fold increase, 92-fold increase, 93-fold increase, 94-fold increase, 95-fold increase, 96-fold increase, 97-fold increase, 98-fold increase, 99-fold increase, 100-fold increase or more) when one or more functions of the DNA mismatch repair (MMR) system are inhibited, blocked, or otherwise inactivated during prime editing. In addition, the inventors have surprisingly found that the frequency of indel formation resulting from prime editing may be significantly decreased (e.g., 2-fold decrease, 3-fold decrease, 4-fold decrease, 5-fold decrease, 6-fold decrease, 7-fold decrease, 8-fold decrease, 9-fold decrease, or 10-fold decrease or lower) when one or more functions of the DNA mismatch repair (MMR) system are inhibited, blocked, or otherwise inactivated during prime editing.

[0283] The disclosure relates to the surprising finding that the efficiency and/or specificity of prime editing is impacted by a cell's own DNA mismatch repair (MMR) DNA repair pathway. As described herein (e.g., in Example 1), the inventors developed a novel genetic screening method—referred to in one embodiment as “pooled CRISPRi screen for prime editing outcomes”—which led to the identification of various genetic determinates, including MMR, as affecting the efficiency and/or specificity of prime editing. Accordingly, in one aspect, the present disclosure provides novel prime editing systems comprising a means for inhibiting and/or evade the effects of MMR, thereby increasing the efficiency and/or specificity of prime editing. In one embodiment, the disclosure provides a prime editing system that comprises an MMR-inhibiting protein, such as, but not limited to, a dominant negative MMR protein, such as a dominant negative MLH1 protein (i.e., “MLH1dn”). In another embodiment, the prime editing system comprises the installation of one or more silent mutations nearby an intended edit, thereby allowing the intended edit from evading MMR recognition, even in the absence of an MMR-inhibiting protein, such as an MLH1dn. In another aspect, the disclosure provides a novel genetic screen for identifying genetic determinants, such as MMR, that impact the efficiency and/or specificity of prime editing. In still further aspects, the disclosure provides nucleic acid constructs encoding the improved prime editing systems described herein. The disclosure in other aspects also provides vectors (e.g., AAV or lentivirus vectors) comprising nucleic acids encoding the improved prime editing system described herein. In still other aspects, the disclosure provides cells comprising the improved prime editing systems described herein. The disclosure also provides in other aspects the components of the genetic screens, including nucleic acid and/or vector constructs, guide RNA, pegRNAs, cells (e.g., CRISPRi cells), and other reagents and/or materials for conducting the herein disclosed genetic screens. In still other aspects, the disclosure provides compositions and kits, e.g., pharmaceutical compositions, comprising the improved prime editing system described herein and which are capable of being administered to a cell, tissue, or organism by any suitable means, such as by gene therapy, mRNA delivery, virus-like particle delivery, or ribonucleoprotein (RNP) delivery. In yet another aspect, the present disclosure provides methods of using the improved prime editing system to install one or more edits in a target nucleic acid molecule, e.g., a genomic locus. In still another aspect, the present disclosure provides methods of treating a disease or disorder using the improved prime editing system to correct or otherwise repair one or more genetic changes (e.g., a single polymorphism) in a target nucleic acid molecule, e.g., a genomic locus comprising one or more disease-causing mutations.

[0284] In one embodiment, the MLH1 protein is inhibited, blocked, or otherwise inactivated. In other embodiments, other proteins of the MMR system are inhibited, blocked, or otherwise inactivated, including, but not limited to, PMS2 (or MutL alpha). PMS1 (or MutL beta), MLH3 (or MutL gamma), MutS alpha (MSH2-MSH6), MutS beta (MSH2-MSH3), MSH2, MSH6, PCNA, RFC, EXO1, POLδ, and PCNA. The inhibition may involve inhibiting the protein with an inhibitor (e.g., antibody or small molecule inhibitor or a dominant negative variant of the protein which disrupts, blocks, or otherwise inactivates the function of the protein, e.g., a dominant negative form of MLH1). The inhibition may also involve any other suitable means, such as by protein degradation (e.g., PROTAC-based degradation of MLH1), transcript-level inhibition (e.g., siRNA transcript degradation/gene silencing or microRNA-based inhibition of translation of the MLH1 transcript), or at the genetic level (i.e., installing a mutation in the MLH1 gene (or regulatory regions) which inactivates or reduces the expression of the MLH1 gene, or which installs a mutation which inactivates, blocks, or minimizes that activity of the encoded MLH1 product). In addition, the disclosure contemplates that the prime editor (e.g., delivered as a fusion protein comprising a napDNAbp and a polymerase, such as a Cas9 nickase fused to a reverse transcriptase) may be administered together with any inhibitor of the DNA mismatch repair pathway.

[0285] Accordingly, the present disclosure provides a method for editing a nucleic acid molecule by prime editing that involves contacting a nucleic acid molecule with a prime editor, a pegRNA, and an inhibitor of the DNA mismatch repair pathway, thereby installing one or more modifications to the nucleic acid molecule at a target site with increased editing efficiency and/or lower indel formation. The present disclosure further provides polynucleotides for editing a DNA target site by prime editing comprising a nucleic acid sequence encoding a napDNAbp, a polymerase, and an inhibitor of the DNA mismatch repair pathway, wherein the napDNAbp and polymerase is capable in the presence of a pegRNA of installing one or more modifications in the DNA target site with increased editing efficiency and/or lower indel formation. The disclosure further provides, vectors, cells, and kits comprising the compositions and polynucleotides of the disclosure, as well as methods of making such vectors, cells, and kits, as well as methods for delivery such compositions, polynucleotides, vectors, cells and kits to cells in vitro, ex vivo (e.g., during cell-based therapy which modify cells outside of the body), and in vivo.

### MMR Pathway

[0286] As noted above, the present disclosure relates to the observation that the efficiency and/or specificity of prime editing is impacted by a cell's own DNA mismatch repair (MMR) DNA repair pathway. DNA mismatch repair (MMR) is a highly conserved biological pathway that plays a key role in maintaining genomic stability (e.g., see FIGS. 8A and 8B). Escherichia coli MutS and MutL and their eukaryotic homologs, MutSα and MutLα, respectively, are key players in MMR-associated genome maintenance. In various aspects, the disclosure contemplates any suitable means by which to inhibit, block, or otherwise inactivate the DNA mismatch repair (MMR) system, including, but not limited to inactivating one or more critical proteins of the MMR system at the genetic level, e.g., by introducing one or more mutations in the gene(s) encoding a protein of the MMR system. Such proteins include, but are not limited to MLH1, PMS2 (or MutL alpha), PMS1 (or MutL beta). MLH3 (or MutL gamma), MutS alpha (MSH2-MSH6), MutS beta (MSH2-MSH3), MSH2, MSH6, PCNA, RFC, EXO1, POLδ, and PCNA. The nucleotide and amino acid sequences of such naturally occurring proteins and variants thereof are known in the art. Exemplary sequences are provided herein. The present disclosure embraces using any inhibitor, blocking agent, knockdown strategy, or other means of inactivating any known protein involved in MMR (“MMR protein”), including any wild type or naturally occurring variant of such MMR protein, and any engineered variant (including single or multiple amino acid substitutions, deletions, insertions, rearrangements, or fusions) of such MMR protein, so long as the inhibiting, blocking, or otherwise inactivation of one or more of said MMR proteins or variants thereof result in the inhibition, blockage, or inactivation of the MMR pathway. The inhibiting, blocking, or inactivation of any one or more MMR proteins or variants may be by any suitable means applied at the genetic level (e.g., in the gene encoding the one or more MMR proteins, such as introducing a mutation that inactivates the MMR protein or variant thereof), transcriptional level (e.g., by transcript knockdown), translational level (e.g., by blocking translation of one or more MMR proteins from their cognate transcripts), or at the protein level (e.g., administering of an inhibitor (e.g., small molecule, antibody, dominant negative protein variant) or by targeted protein degradation (e.g., PROTAC-based degradation).

[0287] In one aspect, the present disclosure provides an improved method of prime editing comprising additionally inhibiting the DNA mismatch repair (MMR) system during prime editing by inhibiting, blocking, or otherwise inactivating MLH1 or a variant thereof.

[0288] Without being bound by theory, MLH1 is a key MMR protein that heterodimerizes with PMS2 to form MutL alpha, a component of the post-replicative DNA mismatch repair system (MMR). DNA repair is initiated by MutS alpha (MSH2-MSH6) or MutS beta (MSH2-MSH3) binding to a dsDNA mismatch, then MutL alpha is recruited to the heteroduplex. Assembly of the MutL-MutS-heteroduplex ternary complex in presence of RFC and PCNA is sufficient to activate endonuclease activity of PMS2. It introduces single-strand breaks near the mismatch and thus generates new entry points for the exonuclease EXO1 to degrade the strand containing the mismatch. DNA methylation would prevent cleavage and therefore assure that only the newly mutated DNA strand is going to be corrected. MutL alpha (MLH1-PMS2) interacts physically with the clamp loader subunits of DNA polymerase III, suggesting that it may play a role to recruit the DNA polymerase III to the site of the MMR. Also implicated in DNA damage signaling, a process which induces cell cycle arrest and can lead to apoptosis in case of major DNA damages. MLH1 also heterodimerizes with MLH3 to form MutL gamma which plays a role in meiosis.

[0289] The “canonical” human MLH1 amino acid sequence is represented by SEQ ID NO: 204.

[0290] MLH1 also may include other human isoforms, including P40692-2 (SEQ ID NO: 205), which differs from the canonical sequence in that residues 1-241 of the canonical sequence are missing.

[0291] MLH1 also may include a third known isoform known as P40692-3 (SEQ ID NO: 207), which differs from the canonical sequence in that residues 1-101 (of MSFVAGVIRR . . . ASISTYGFRG (SEQ ID NO: 206)) are replaced with MAF.

### MMR Inhibitors and Methods of MMR Inhibition

[0292] The present disclosure provides a method for editing a nucleic acid molecule by prime editing that involves contacting a nucleic acid molecule with a prime editor, a pegRNA, and an inhibitor of the DNA mismatch repair pathway, thereby installing one or more modifications to the nucleic acid molecule at a target site with increased editing efficiency and/or lower indel formation. Thus, the present disclosure contemplates any suitable means to inhibit MMR. In one embodiment, the disclosure embraces administering an effective amount of an inhibitor of the MMR pathway. In various embodiments, the MMR pathway may be inhibited by inhibiting, blocking, or inactivating any one or more MMR proteins or variants at the genetic level (e.g., in the gene encoding the one or more MMR proteins, such as introducing a mutation that inactivates the MMR protein or variant thereof), transcriptional level (e.g., by transcript knockdown), translational level (e.g., by blocking translation of one or more MMR proteins from their cognate transcripts), or at the protein level (e.g., application of an inhibitor (e.g., small molecule, antibody, dominant negative protein partner) or by targeted protein degradation (e.g., PROTAC-based degradation). The present disclosure also contemplates methods of prime editing which are designed to install modifications to a nucleic acid molecule that evade correction by the MMR pathway, without the need to provide an MMR inhibitor.

[0293] The inventors developed prime editing which enables the insertion, deletion, or replacement of genomic DNA sequences without requiring error-prone double-strand DNA breaks. The present disclosure now provides an improved method of prime editing involving the blocking, inhibiting, or inactivation of the MMR pathway (e.g., by inhibiting, blocking, or inactivating an MMR pathway protein, including MLH1) during prime editing, whereby doing so surprisingly results in increased editing efficiency and reduced indel formation. As used herein, “during” prime editing can embrace any suitable sequence of events, such that the prime editing step can be applied before, at the same time, or after the step of blocking, inhibiting, or inactivating the MMR pathway (e.g., by targeting the inhibition of MLH1).

[0294] Prime editing uses an engineered Cas9 nickase-reverse transcriptase fusion protein (e.g., PE1 or PE2) paired with an engineered prime editing guide RNA (pegRNA) that both directs Cas9 to the target genomic site and encodes the information for installing the desired edit. Prime editing proceeds through a multi-step editing process: 1) the Cas9 domain binds and nicks the target genomic DNA site, which is specified by the pegRNA's spacer sequence; 2) the reverse transcriptase domain uses the nicked genomic DNA as a primer to initiate the synthesis of an edited DNA strand using an engineered extension on the pegRNA as a template for reverse transcription—this generates a single-stranded 3′ flap containing the edited DNA sequence; 3) cellular DNA repair resolves the 3′ flap intermediate by the displacement of a 5′ flap species that occurs via invasion by the edited 3′ flap, excision of the 5′ flap containing the original DNA sequence, and ligation of the new 3′ flap to incorporate the edited DNA strand, forming a heteroduplex of one edited and one unedited strand; and 4) cellular DNA repair replaces the unedited strand within the heteroduplex using the edited strand as a template for repair, completing the editing process.

[0295] Efficient incorporation of the desired edit requires that the newly synthesized 3′ flap contains a portion of sequence that is homologous to the genomic DNA site. This homology enables the edited 3′ flap to compete with the endogenous DNA strand (the corresponding 5′ flap) for incorporation into the DNA duplex. Because the edited 3′ flap will contain less sequence homology than the endogenous 5′ flap, the competition is expected to favor the 5′ flap strand. Thus, a potential limiting factor in the efficiency of prime editing may be the failure of the 3′ flap, which contains the edit, to effectively invade and displace the 5′ flap strand. Moreover, successful 3′ flap invasion and removal of the 5′ flap only incorporates the edit on one strand of the double-stranded DNA genome. Permanent installation of the edit requires cellular DNA repair to replace the unedited complementary DNA strand using the edited strand as a template. While the cell can be made to favor replacement of the unedited strand over the edited strand (step 4 above) by the introduction of a nick in the unedited strand adjacent to the edit using a secondary sgRNA (the PE3 system), this process still relies on a second stage of DNA repair.

[0296] This disclosure describes a modified approach to prime editing that comprises additionally inhibiting, blocking, or otherwise inactivating the DNA mismatch repair (MMR) system. In some embodiments, an MMR inhibitor is provided to the target nucleic acid along with other components of a prime editing system, for example, an exogenous MMR inhibitor such as an siRNA can be provided to a cell comprising the target nucleic acid. In some embodiments, a prime editing system component, e.g., a pegRNA, is designed to install modifications in the target nucleic acid which evade the MMR system, without the need to provide an inhibitor. In certain embodiments, the DNA mismatch repair (MMR) system can be inhibited, blocked, or otherwise inactivating one or more proteins of the MMR system, including, but not limited to MLH1. PMS2 (or MutL alpha), PMS1 (or MutL beta). MLH3 (or MutL gamma), MutS alpha (MSH2-MSH6). MutS beta (MSH2-MSH3), MSH2, MSH6, PCNA, RFC, EXO1, POLδ, and PCNA. The disclosure contemplates any suitable means by which to inhibit, block, or otherwise inactivate the DNA mismatch repair (MMR) system, including, but not limited to inactivating one or more critical proteins of the MMR system at the genetic level, e.g., by introducing one or more mutations in the genes encoding a protein of the MMR system, e.g., MLH1, PMS2 (or MutL alpha), PMS1 (or MutL beta), MLH3 (or MutL gamma). MutS alpha (MSH2-MSH6), MutS beta (MSH2-MSH3), MSH2, MSH6, PCNA, RFC, EXO1, POLδ, and PCNA.

[0297] Thus, in one aspect, the present disclosure provides a method for editing a nucleotide molecule (e.g., a genome) using prime editing while blocking, inhibiting, or otherwise inactivating the DNA mismatch repair (MMR) system.

[0298] In another aspect, the present disclosure provides a method for editing a nucleotide molecule (e.g., a genome) using prime editing while blocking, inhibiting, or otherwise inactivating a protein of the MMR system, e.g., MLH1, PMS2 (or MutL alpha), PMS1 (or MutL beta), MLH3 (or MutL gamma), MutS alpha (MSH2-MSH6), MutS beta (MSH2-MSH3), MSH2, MSH6, PCNA, RFC, EXO1, POLδ, and PCNA.

[0299] In one aspect, the present disclosure provides an improved method of prime editing comprising additionally inhibiting the DNA mismatch repair (MMR) system during prime editing by inhibiting, blocking, or otherwise inactivating MLH1 or a variant thereof. Without being bound by theory, MLH1 is a key MMR protein that heterodimerizes with PMS2 to form MutL alpha, a component of the post-replicative DNA mismatch repair system (MMR). DNA repair is initiated by MutS alpha (MSH2-MSH6) or MutS beta (MSH2-MSH3) binding to a dsDNA mismatch, then MutL alpha is recruited to the heteroduplex. Assembly of the MutL-MutS-heteroduplex ternary complex in presence of RFC and PCNA is sufficient to activate endonuclease activity of PMS2. It introduces single-strand breaks near the mismatch and thus generates new entry points for the exonuclease EXO1 to degrade the strand containing the mismatch. DNA methylation would prevent cleavage and therefore assure that only the newly mutated DNA strand is going to be corrected. MutL alpha (MLH1-PMS2) interacts physically with the clamp loader subunits of DNA polymerase III, suggesting that it may play a role to recruit the DNA polymerase III to the site of the MMR. Also implicated in DNA damage signaling, a process which induces cell cycle arrest and can lead to apoptosis in case of major DNA damages. MLH1 also heterodimerizes with MLH3 to form MutL gamma which plays a role in meiosis. The “canonical” human MLH1 amino acid sequence is represented by SEQ ID NO: 204

[0300] MLH1 also may include other human isoforms, including P40692-2 (SEQ ID NO: 205), which differs from the canonical sequence in that residues 1-241 of the canonical sequence are missing.

[0301] MLH1 also may include a third known isoform known as P40692-3 (SEQ ID NO: 207), which differs from the canonical sequence in that residues 1-101 (of MSFVAGVIRR . . . ASISTYGFRG (SEQ ID NO: 206)) are replaced with MAF.

[0302] The disclosure contemplates that any of the following MLH1 proteins may be inhibited by an inhibitor, or otherwise blocked or inactivated in order to inhibit the MMR pathway during prime editing. In addition, such exemplary proteins may also be used to engineer or otherwise make a dominant negative variant that may be used as a type of inhibitor when administered in an effective amount which blocks, inactivates, or inhibits the MMR. Without being bound by theory, it is believed that MLH1 dominant negative mutants can saturate binding of MutS. Exemplary MLH1 proteins include the following amino acid sequences, or amino acid sequences having at least 70%, at least 75%, at least 80%, at least 85%, at least 90%, at least 95%, at least 96%, at least 97%, at least 98%, at least 99%, or up to 100% sequence identity with any of the following sequences:

| | | SEQ |
|---|---|---|
| Description | Sequence | ID NO: |
| MLH1 | MSFVAGVIRRLDETVVNRIAAGEVIQRPANAIKEMIENCLDAKSTSIQVIVKEGG | 204 |
| Homo sapiens | LKLIQIQDNGTGIRKEDLDIVCERFTTSKLQSFEDLASISTYGFRGEALASISHVAH | |
| SwissProt | VTITTKTADGKCAYRASYSDGKLKAPPKPCAGNQGTQITVEDLFYNIATRRKAL | |
| Accession No. | KNPSEEYGKILEVVGRYSVHNAGISFSVKKQGETVADVRTLPNASTVDNIRSIFG | |
| P40692 | NAVSRELIEIGCEDKTLAFKMNGYISNANYSVKKCIFLLFINHRLVESTSLRKAIE | |
| Wild type | TVYAAYLPKNTHPFLYLSLEISPQNVDVNVHPTKHEVHFLHEESILERVQQHIES | |
| | KLLGSNSSRMYFTQTLLPGLAGPSGEMVKSTTSLTSSSTSGSSDKVYAHQMVRT | |
| | DSREQKLDAFLQPLSKPLSSQPQAIVTEDKTDISSGRARQQDEEMLELPAPAEVA | |
| | AKNQSLEGDTTKGTSEMSEKRGPTSSNPRKRHREDSDVEMVEDDSRKEMTAAC | |
| | TPRRRIINLTSVLSLQEEINEQGHEVLREMLHNHSFVGCVNPQWALAQHQTKLY | |
| | LLNTTKLSEELFYQILIYDFANFGVLRLSEPAPLFDLAMLALDSPESGWTEEDGP | |
| | KEGLAEYIVEFLKKKAEMLADYFSLEIDEEGNLIGLPLLIDNYVPPLEGLPIFILRL | |
| | ATEVNWDEEKECFESLSKECAMFYSIRKQYISEESTLSGQQSEVPGSIPNSWKWT | |
| | VEHIVYKALRSHILPPKHFTEDGNILQLANLPDLYKVFERC | |
| MLH1 | MAFVAGVIRRLDETVVNRIAAGEVIQRPANAIKEMIENCLDAKSTNIQVVVKEG | 219 |
| Mus musculus | GLKLIQIQDNGTGIRKEDLDIVCERFTTSKLQTFEDLASISTYGFRGEALASISHV | |
| SwissProt | AHVTITTKTADGKCAYRASYSDGKLQAPPKPCAGNQGTLITVEDLFYNIITRRK | |
| Accession No. | ALKNPSEEYGKILEVVGRYSIHNSGISFSVKKQGETVSDVRTLPNATTVDNIRSIF | |
| Q9JK91 | GNAVSRELIEVGCEDKTLAFKMNGYISNANYSVKKCIFLLFINHRLVESAALRK | |
| Wild type | AIETVYAAYLPKNTHPFLYLSLEISPQNVDVNVHPTKHEVHFLHEESILQRVQQH | |
| | IESKLLGSNSSRMYFTQTLLPGLAGPSGEAARPTTGVASSSTSGSGDKVYAYQM | |
| | VRTDSREQKLDAFLQPVSSLGPSQPQDPAPVRGARTEGSPERATREDEEMLALP | |
| | APAEAAAESENLERESLMETSDAAQKAAPTSSPGSSRKRHREDSDVEMVENAS | |
| | GKEMTAACYPRRRIINLTSVLSLQEEISERCHETLREMLRNHSFVGCVNPQWAL | |
| | AQHQTKLYLLNTTKLSEELFYQILIYDFANFGVLRLSEPAPLFDLAMLALDSPES | |
| | GWTEDDGPKEGLAEYIVEFLKKKAEMLADYFSVEIDEEGNLIGLPLLIDSYVPPL | |
| | EGLPIFILRLATEVNWDEEKECFESLSKECAMFYSIRKQYILEESTLSGQQSDMPG | |
| | STSKPWKWTVEHIIYKAFRSHLLPPKHFTEDGNVLQLANLPDLYKVFERC | |
| MLH1 | MSFVAGVIRRLDETVVNRIAAGEVIQRPANAIKEMTENCLDAKSTNIQVIVREG | 220 |
| Rattus | GLKLIQIQDNGTGIRKEDLDIVCERFTTSKLQTFEDLAMISTYGFRGEALASISHV | |
| norvegicus | AHVTITTKTADGKCAYRASYSDGKLQAPPKPCAGNQGTLITVEDLFYNIITRKK | |
| SwissProt | ALKNPSEEYGKILEVVGRYSIHNSGISFSVKKQGETVSDVRTLPNATTVDNIRSIF | |
| Accession No. | GNAVSRELIEVGCEDKTLAFKMNGYISNANYSVKKCIFLLFINHRLVESAALKK | |
| P97679 | AIEAVYAAYLPKNTHPFLYLILEISPQNVDVNVHPTKHEVHFLHEESILERVQQHI | |
| Wild type | ESKLLGSNSSRMYFTQTLLPGLAGPSGEAVKSTTGIASSSTSGSGDKVHAYQMV | |
| | RTDSRDQKLDAFMQPVSRRLPSQPQDPVPGNRTEGSPEKAMQKDQEISELPAPM | |
| | EAAADSASLERESVIGASEVVAPQRHPSSPGSSRKRHPEDSDVEMMENDSRKEM | |
| | TAACYPRRRIINLTSVLSLQEEINDRGHETLREMLRNHTFVGCVNPQWALAQHQ | |
| | TKLYLLNTTKLSEELFYQILIYDFANFGVLRLPEPAPLFDFAMLALDSPESGWTE | |
| | EDGPKEGLAEYIVEFLKKKAKMLADYFSVEIDEEGNLIGLPLLIDSYVPPLEGLPI | |
| | FILRLATEVNWDEEECFESLSKECAVFYSIRKQYILEESALSGQQSDMPGSPSKP | |
| | WKWTVEHIIYKAFRSHLLPPKHFTEDGNVLQLANLPDLCKVFERC | |
| MLH1 | MSLVAGVIRRLDETVVNRIAAGEVIQRPANAIKEMIENCLDAKSTSIQVVVKEG | 221 |
| Bos taurus | GLKLIQIQDNGTGIRKEDLEIVCERFTTSKLQSFEDLAHISTYGFRGEALASISHV | |
| SwissProt | AHVTITTKTADGKCAYRAHYSDGKLKAPPKPCAGNQGTQITVEDLFYNISTRRK | |
| Accession No. | ALKNPSEEYGKILEVVGRYAVHNSGIGFSVKKQGETVADVRTLPNATTVDNIRS | |
| FIMPGO | IFGNAVSRELIEVECEDKTLAFKMNGYISNANYSVKKCIFLLFINHRLVESASLRK | |
| Wild type | AIETVYAAYLPKSTHPFLYLSLEISPQNVDVNVHPTKHEVHFLHEDSILERLQQHI | |
| | ESRLLGSNASRTYFTQTLLPGLPGPSGEAVKSTASVTSSSTAGSGDRVYAHQMV | |
| | RTDCREQKLDAFLQPVSKALSSQPQAVVPEHRTDASSSGTRQQDEEMLELPAPA | |
| | AVAAKSQALEDDATMRAADLAEKRGPSSSPENPRKRPREDSDVEMVEDASRKE | |
| | MTAACTPRRRIINLTSVLSLQEEINERGHETLREMLHNHSFVGCVNPQWALAQH | |
| | QTKLYLLNTTRLSEELFYQILVYDFANFGVLRLSEPAPLFDLAMLALDSPESGWT | |
| | EEDGPKEGLAEYIVEFLKKKAEMLADYFSLEIDEEGNLVGLPLLIDNYVPPLEGL | |
| | PIFILRLATEVNWDEEKECFESLSKECAMFYSIRKQYVSAESTLSGQQSEVPGST | |
| | ANPWKWTVEHVIYKAFRSHLLPPKHFTEDGNILQLANLPDLYKVFERC | |

[0303] methods and compositions described herein utilize MLH1 mutants or truncated variants. In some embodiments, the mutants and truncated variants of the human MLH1 wild-type protein are utilized.

[0304] In one aspect, a truncated variant of human MLH1 is provided by this disclosure. In some embodiments, amino acids 754-756 of the wild-type human MLH1l protein are truncated (Δ754-756, hereinafter referred to as MLH1dn). In some embodiments, a truncated variant of human MLH1 comprising only the N-terminal domain (amino acids 1-335) is provided (hereinafter referred to as MLH1dn^{NTD}. In various embodiments, the following MLH11 variants are provided in this disclosure:

| | | SEQ |
|---|---|---|
| Description | Sequence | ID NO: |
| MLH1 E34A | MSFVAGVIRRLDETVVNRIAAGEVIQRPANAIKAMIENCLDAKSTSIQVIVKEGG | 222 |
| | LKLIQIQDNGTGIRKEDLDIVCERFTTSKLQSFEDLASISTYGFRGEALASISHVAH | |
| | VTITTKTADGKCAYRASYSDGKLKAPPKPCAGNQGTQITVEDLFYNIATRRKAL | |
| | KNPSEEYGKILEVVGRYSVHNAGISFSVKKQGETVADVRTLPNASTVDNIRSIFG | |
| | NAVSRELIEIGCEDKTLAFKMNGYISNANYSVKKCIFLLFINHRLVESTSLRKAIE | |
| | TVYAAYLPKNTHPFLYLSLEISPQNVDVNVHPTKHEVHFLHEESILERVQQHIES | |
| | KLLGSNSSRMYFTQTLLPGLAGPSGEMVKSTTSLTSSSTSGSSDKVYAHQMVRT | |
| | DSREQKLDAFLQPLSKPLSSQPQAIVTEDKTDISSGRARQQDEEMLELPAPAEVA | |
| | AKNQSLEGDTTKGTSEMSEKRGPTSSNPRKRHREDSDVEMVEDDSRKEMTAAC | |
| | TPRRRIINLTSVLSLQEEINEQGHEVLREMLHNHSFVGCVNPQWALAQHQTKLY | |
| | LLNTTKLSEELFYQILIYDFANFGVLRLSEPAPLFDLAMLALDSPESGWTEEDGP | |
| | KEGLAEYIVEFLKKKAEMLADYFSLEIDEEGNLIGLPLLIDNYVPPLEGLPIFILRL | |
| | ATEVNWDEEKECFESLSKECAMFYSIRKQYISEESTLSGQQSEVPGSIPNSWKWT | |
| | VEHIVYKALRSHILPPKHFTEDGNILQLANLPDLYKVFERC | |
| MLH1 Δ756 | MSFVAGVIRRLDETVVNRIAAGEVIQRPANAIKEMIENCLDAKSTSIQVIVKEGG | 208 |
| | LKLIQIQDNGTGIRKEDLDIVCERFTTSKLQSFEDLASISTYGFRGEALASISHVAH | |
| | VTITTKTADGKCAYRASYSDGKLKAPPKPCAGNQGTQITVEDLFYNIATRRKAL | |
| | KNPSEEYGKILEVVGRYSVHNAGISFSVKKQGETVADVRTLPNASTVDNIRSIFG | |
| | NAVSRELIEIGCEDKTLAFKMNGYISNANYSVKKCIFLLFINHRLVESTSLRKAIE | |
| | TVYAAYLPKNTHPFLYLSLEISPQNVDVNVHPTKHEVHFLHEESILERVQQHIES | |
| | KLLGSNSSRMYFTQTLLPGLAGPSGEMVKSTTSLTSSSTSGSSDKVYAHQMVRT | |
| | DSREQKLDAFLQPLSKPLSSQPQAIVTEDKTDISSGRARQQDEEMLELPAPAEVA | |
| | AKNQSLEGDTTKGTSEMSEKRGPTSSNPRKRHREDSDVEMVEDDSRKEMTAAC | |
| | TPRRRIINLTSVLSLQEEINEQGHEVLREMLHNHSFVGCVNPQWALAQHQTKLY | |
| | LLNTTKLSEELFYQILIYDFANFGVLRLSEPAPLFDLAMLALDSPESGWTEEDGP | |
| | KEGLAEYIVEFLKKKAEMLADYFSLEIDEEGNLIGLPLLIDNYVPPLEGLPIFILRL | |
| | ATEVNWDEEKECFESLSKECAMFYSIRKQYISEESTLSGQQSEVPGSIPNSWKWT | |
| | VEHIVYKALRSHILPPKHFTEDGNILQLANLPDLYKVFER[-] | |
| MLH1 Δ754- | MSFVAGVIRRLDETVVNRIAAGEVIQRPANAIKEMIENCLDAKSTSIQVIVKEGG | 209 |
| 756 | LKLIQIQDNGTGIRKEDLDIVCERFTTSKLQSFEDLASISTYGFRGEALASISHVAH | |
| | VTITTKTADGKCAYRASYSDGKLKAPPKPCAGNQGTQITVEDLFYNIATRRKAL | |
| | KNPSEEYGKILEVVGRYSVHNAGISFSVKKQGETVADVRTLPNASTVDNIRSIFG | |
| | NAVSRELIEIGCEDKTLAFKMNGYISNANYSVKKCIFLLFINHRLVESTSLRKAIE | |
| | TVYAAYLPKNTHPFLYLSLEISPQNVDVNVHPTKHEVHFLHEESILERVQQHIES | |
| | KLLGSNSSRMYFTQTLLPGLAGPSGEMVKSTTSLTSSSTSGSSDKVYAHQMVRT | |
| | DSREQKLDAFLQPLSKPLSSQPQAIVTEDKTDISSGRARQQDEEMLELPAPAEVA | |
| | AKNQSLEGDTTKGTSEMSEKRGPTSSNPRKRHREDSDVEMVEDDSRKEMTAAC | |
| | TPRRRIINLTSVLSLQEEINEQGHEVLREMLHNHSFVGCVNPQWALAQHQTKLY | |
| | LLNTTKLSEELFYQILIYDFANFGVLRLSEPAPLFDLAMLALDSPESGWTEEDGP | |
| | KEGLAEYIVEFLKKKAEMLADYFSLEIDEEGNLIGLPLLIDNYVPPLEGLPIFILRL | |
| | ATEVNWDEEKECFESLSKECAMFYSIRKQYISEESTLSGQQSEVPGSIPNSWKWT | |
| | VEHIVYKALRSHILPPKHFTEDGNILQLANLPDLYKVF[---] | |
| MLH1 E34A | MSFVAGVIRRLDETVVNRIAAGEVIQRPANAIKAMIENCLDAKSTSIQVIVKEGG | 210 |
| 4754-756 | LKLIQIQDNGTGIRKEDLDIVCERFTTSKLQSFEDLASISTYGFRGEALASISHVAH | |
| | VTITTKTADGKCAYRASYSDGKLKAPPKPCAGNQGTQITVEDLFYNIATRRKAL | |
| | KNPSEEYGKILEVVGRYSVHNAGISFSVKKQGETVADVRTLPNASTVDNIRSIFG | |
| | NAVSRELIEIGCEDKTLAFKMNGYISNANYSVKKCIFLLFINHRLVESTSLRKAIE | |
| | TVYAAYLPKNTHPFLYLSLEISPQNVDVNVHPTKHEVHFLHEESILERVQQHIES | |
| | KLLGSNSSRMYFTQTLLPGLAGPSGEMVKSTTSLTSSSTSGSSDKVYAHQMVRT | |
| | DSREQKLDAFLQPLSKPLSSQPQAIVTEDKTDISSGRARQQDEEMLELPAPAEVA | |
| | AKNQSLEGDTTKGTSEMSEKRGPTSSNPRKRHREDSDVEMVEDDSRKEMTAAC | |
| | TPRRRIINLTSVLSLQEEINEQGHEVLREMLHNHSFVGCVNPQWALAQHQTKLY | |
| | LLNTTKLSEELFYQILIYDFANFGVLRLSEPAPLFDLAMLALDSPESGWTEEDGP | |
| | KEGLAEYIVEFLKKKAEMLADYFSLEIDEEGNLIGLPLLIDNYVPPLEGLPIFILRL | |
| | ATEVNWDEEKECFESLSKECAMFYSIRKQYISEESTLSGQQSEVPGSIPNSWKWT | |
| | VEHIVYKALRSHILPPKHFTEDGNILQLANLPDLYKVF[---] | |
| MLH1 1-335 | MSFVAGVIRRLDETVVNRIAAGEVIQRPANAIKEMIENCLDAKSTSIQVIVKEGG | 211 |
| | ILKLIQIQDNGTGIRKEDLDIVCERFTTSKLQSFEDLASISTYGFRGEALASISHVAH | |
| | VTITTKTADGKCAYRASYSDGKLKAPPKPCAGNQGTQITVEDLFYNIATRRKAL | |
| | KNPSEEYGKILEVVGRYSVHNAGISFSVKKQGETVADVRTLPNASTVDNIRSIFG | |
| | NAVSRELIEIGCEDKTLAFKMNGYISNANYSVKKCIFLLFINHRLVESTSLRKAIE | |
| | TVYAAYLPKNTHPFLYLSLEISPQNVDVNVHPTKHEVHFLHEESILERVQQHIES | |
| | KLL | |
| MLH1 1-335 | MSFVAGVIRRLDETVVNRIAAGEVIQRPANAIKAMIENCLDAKSTSIQVIVKEGG | 212 |
| E34A | LKLIQIQDNGTGIRKEDLDIVCERFTTSKLQSFEDLASISTYGFRGEALASISHVAH | |
| | VTITTKTADGKCAYRASYSDGKLKAPPKPCAGNQGTQITVEDLFYNIATRRKAL | |
| | KNPSEEYGKILEVVGRYSVHNAGISFSVKKQGETVADVRTLPNASTVDNIRSIFG | |
| | NAVSRELIEIGCEDKTLAFKMNGYISNANYSVKKCIFLLFINHRLVESTSLRKAIE | |
| | TVYAAYLPKNTHPFLYLSLEISPQNVDVNVHPTKHEVHFLHEESILERVQQHIES | |
| | KLL | |
| MLH1 1-335 | MSFVAGVIRRLDETVVNRIAAGEVIQRPANAIKEMIENCLDAKSTSIQVIVKEGG | 213 |
| NIS^{SV40} | LKLIQIQDNGTGIRKEDLDIVCERFTTSKLQSFEDLASISTYGFRGEALASISHVAH | |
| | VTITTKTADGKCAYRASYSDGKLKAPPKPCAGNQGTQITVEDLFYNIATRRKAL | |
| | KNPSEEYGKILEVVGRYSVHNAGISFSVKKQGETVADVRTLPNASTVDNIRSIFG | |
| | NAVSRELIEIGCEDKTLAFKMNGYISNANYSVKKCIFLLFINHRLVESTSLRKAIE | |
| | TVYAAYLPKNTHPFLYLSLEISPQNVDVNVHPTKHEVHFLHEESILERVQQHIES | |
| | KLLPKKKRKV | |
| MLH1 501-756 | INLTSVLSLQEEINEQGHEVLREMLHNHSFVGCVNPQWALAQHQTKLYLLNTT | 215 |
| | KLSEELFYQILIYDFANFGVLRLSEPAPLFDLAMLALDSPESGWTEEDGPKEGLA | |
| | EYIVEFLKKKAEMLADYFSLEIDEEGNLIGLPLLIDNYVPPLEGLPIFILRLATEVN | |
| | WDEEKECFESLSKECAMFYSIRKQYISEESTLSGQQSEVPGSIPNSWKWTVEHIV | |
| | YKALRSHILPPKHFTEDGNILQLANLPDLYKVFERC | |
| MLH1 501-753 | INLTSVLSLQEEINEQGHEVLREMLHNHSFVGCVNPQWALAQHQTKLYLLNTT | 216 |
| | KLSEELFYQILIYDFANFGVLRLSEPAPLFDLAMLALDSPESGWTEEDGPKEGLA | |
| | EYIVEFLKKKAEMLADYFSLEIDEEGNLIGLPLLIDNYVPPLEGLPIFILRLATEVN | |
| | WDEEKECFESLSKECAMFYSIRKQYISEESTLSGQQSEVPGSIPNSWKWTVEHIV | |
| | YKALRSHILPPKHFTEDGNILQLANLPDLYKVF[---] | |
| MLH1 461-756 | KRGPTSSNPRKRHREDSDVEMVEDDSRKEMTAACTPRRRIINLTSVLSLQEEINE | 217 |
| | QGHEVLREMLHNHSFVGCVNPQWALAQHQTKLYLLNTTKLSEELFYQILIYDF | |
| | ANFQVLRLSEPAPLFDLAMLALDSPESGWTEEDGPKEGLAEYIVEFLKKKAEML | |
| | ADYFSLEIDEEGNLIGLPLLIDNYVPPLEGLPIFILRLATEVNWDEEKECFESLSKE | |
| | CAMFYSIRKQYISEESTLSGQQSEVPGSIPNSWKWTVEHIVYKALRSHILPPKHFT | |
| | EDGNILQLANLPDLYKVFERC | |
| MLH1 461-753 | KRGPTSSNPRKRHREDSDVEMVEDDSRKEMTAACTPRRRIINLTSVLSLQEEINE | 218 |
| | QGHEVLREMLHNHSFVGCVNPQWALAQHQTKLYLLNTTKLSEELFYQILIYDF | |
| | ANFGVLRLSEPAPLEDLAMLALDSPESGWTEEDGPKEGLAEYIVEFLKKKAEML | |
| | ADYFSLEIDEEGNLIGLPLLIDNYVPPLEGLPIFILRLATEVNWDEEKECFESLSKE | |
| | CAMFYSIRKQYISEESTLSGQQSEVPGSIPNSWKWTVEHIVYKALRSHILPPKHFT | |
| | EDGNILQLANLPDLYKVF[---] | |
| NLS^{SV40} MLH1 | PKKKRKVINLTSVLSLQEEINEQGHEVLREMLHNHSFVGCVNPQWALAQHQT | 223 |
| 501-753 | KLYLLNTTKLSEELFYQILIYDFANFGVLRLSEPAPLFDLAMLALDSPESGWTEE | |
| | DGPKEGLAEYIVEFLKKKAEMLADYFSLEIDEEGNLIGLPLLIDNYVPPLEGLPIFI | |
| | LRLATEVNWDEEKECFESLSKECAMFYSIRKQYISEESTLSGQQSEVPGSIPNSW | |
| | KWTVEHIVYKALRSHILPPKHFTEDGNILQLANLPDLYKVF[---] | |
| NLS^{SV40} MLH1 | PKKKRKVKRGPTSSNPRKRHREDSDVEMVEDDSRKEMTAACTPRRRIINLTSV | 224 |
| 461-753 | LSLQEEINEQGHEVLREMLHNHSFVGCVNPQWALAQHQTKLYLLNTTKLSEEL | |
| | FYQILIYDFANFGVLRLSEPAPLFDLAMLALDSPESGWTEEDGPKEGLAEYIVEF | |
| | LKKKAEMLADYFSLEIDEEGNLIGLPLLIDNYVPPLEGLPIFILRLATEVNWDEEK | |
| | ECFESLSKECAMFYSIRKQYISEESTLSGQQSEVPGSIPNSWKWTVEHIVYKALR | |
| | SHILPPKHFTEDGNILQLANLPDLYKVF[---] | |

[0305] In another aspect, the present disclosure provides a method for editing a nucleotide molecule (e.g., a genome) using prime editing while blocking, inhibiting, or otherwise inactivating PMS2 (or MutL alpha) or variant thereof.

[0306] In yet another aspect, the present disclosure provides a method for editing a nucleotide molecule (e.g., a genome) using prime editing while blocking, inhibiting, or otherwise inactivating PMS1 (or MutL beta) or variant thereof.

[0307] In still another aspect, the present disclosure provides a method for editing a nucleotide molecule (e.g., a genome) using prime editing while blocking, inhibiting, or otherwise inactivating MLH3 (or MutL gamma) or variant thereof.

[0308] In another aspect, the present disclosure provides a method for editing a nucleotide molecule (e.g., a genome) using prime editing while blocking, inhibiting, or otherwise inactivating MutS alpha (MSH2-MSH6) or variant thereof.

[0309] In still another aspect, the present disclosure provides a method for editing a nucleotide molecule (e.g., a genome) using prime editing while blocking, inhibiting, or otherwise inactivating MSH2 or variant thereof.

[0310] In another aspect, the present disclosure provides a method for editing a nucleotide molecule (e.g., a genome) using prime editing while blocking, inhibiting, or otherwise inactivating MSH6 or variant thereof.

[0311] In yet another aspect, the present disclosure provides a method for editing a nucleotide molecule (e.g., a genome) using prime editing while blocking, inhibiting, or otherwise inactivating PCNA or variant thereof.

[0312] In still another aspect, the present disclosure provides a method for editing a nucleotide molecule (e.g., a genome) using prime editing while blocking, inhibiting, or otherwise inactivating RFC or variant thereof.

[0313] In another aspect, the present disclosure provides a method for editing a nucleotide molecule (e.g., a genome) using prime editing while blocking, inhibiting, or otherwise inactivating EXO1or variant thereof.

[0314] In yet another aspect, the present disclosure provides a method for editing a nucleotide molecule (e.g., a genome) using prime editing while blocking, inhibiting, or otherwise inactivating POLδ or variant thereof.

[0315] Exemplary amino acid sequences for these MMR proteins (PMS2 (or MutL alpha), PMS1 (or MutL beta), MLH3 (or MutL gamma), MutS alpha (MSH2-MSH6). MutS beta (MSH2-MSH-3), MSH-2, MSH6, PCNA, RFC, EXO1, POLδ, and PCNA) are as follows:

| | | SEQ |
|---|---|---|
| | | ID |
| Description | Sequence | NQ |
| PMS2 | MERAESSSTEPAKAIKPIDRKSVHQICSGQVVLSLSTAVKELVENSLDAGATNIDL | 225 |
| Homo sapiens | KLKDYGVDLIEVSDNGCGVEEENFEGLTLKHHTSKIQEFADLTQVETFGFRGEAL | |
| SwissProt | SSLCALSDVTISTCHASAKVGTRLMFDHNGKIIQKTPYPRPRGTTVSVQQLFSTLP | |
| Accession No. | VRHKEFQRNIKKEYAKMVQVLHAYCIISAGIRVSCTNQLGQGKRQPVVCTGGSP | |
| P54278 | SIKENIGSVFGQKQLQSLIPFVQLPPSDSVCEEYGLSCSDALHNLFYISGFISQCTHG | |
| Wild type | VGRSSTDRQFFFINRRPCDPAKVCRLVNEVYHMYNRHQYPFVVLNISVDSECVDI | |
| | NVTPDKRQILLQEEKLLLAVLKTSLIGMFDSDVNKLNVSQQPLLDVEGNLIKMH | |
| | AADLEKPMVEKQDQSPSLRTGEEKKDVSISRLREAFSLRHTTENKPHSPKTPEPR | |
| | RSPLGQKRGMLSSSTSGAISDKGVLRPQKEAVSSSHGPSDPTDRAEVEKDSGHGS | |
| | TSVDSEGFSIPDTGSHCSSEYAASSPGDRGSQEHVDSQEKAPKTDDSFSDVDCHS | |
| | NQEDTGCKFRVLPQPTNLATPNTKRFKKEEILSSSDICQKLVNTQDMSASQVDVA | |
| | VKINKKVVPLDESMSSLAKRIKQLHHEAQQSEGEQNYRKFRAKICPGENQAAED | |
| | ELRKEISKTMFAEMEIIGQFNLGFIITKLNEDIFIVDQHATDEKYNFEMLQQHTVL | |
| | QGQRLIAPQTLNLTAVNEAVLIENLEIFRKNGFDFVIDENAPVTERAKLISLPTSKN | |
| | WTFGPQDVDELIFMLSDSPGVMCRPSRVKQMFASRACRKSVMIGTALNTSEMK | |
| | KLITHMGEMDHPWNCPHGRPTMRHIANLGVISQN | |
| PMS1 | MKQLPAATVRLLSSSQIITSVVSVVKELIENSLDAGATSVDVKLENYGFDKIEVRD | 226 |
| Homo sapiens | NGEGIKAVDAPVMAMKYYTSKINSHEDLENLTTYGFRGEALGSICCIAEVLITTR | |
| SwissProt | TAADNFSTQYVLDGSGHILSQKPSHLGQGTTVTALRLFKNLPVRKQFYSTAKKC | |
| Accession No. | KDEIKKIQDLLMSFGILKPDLRIVFVHNKAVIWQKSRVSDHKMALMSVLGTAVM | |
| P54277 | NNMESFQYHSEESQIYLSGFLPKCDADHSFTSLSTPERSFIFINSRPVHQKDILKLIR | |
| Wild type | HHYNLKCLKESTRLYPVFFLKIDVPTADVDVNLTPDKSQVLLQNKESVLIALENL | |
| | MTTCYGPLPSTNSYENNKTDVSAADIVLSKTAETDVLFNKVESSGKNYSNVDTS | |
| | VIPFQNDMHNDESGKNTDDCLNHQISIGDFGYGHCSSEISNIDKNTKNAFQDISMS | |
| | NVSWENSQTEYSKTCFISSVKHTQSENGNKDHIDESGENEEEAGLENSSEISADE | |
| | WSRGNILKNSVGENIEPVKILVPEKSLPCKVSNNNYPIPEQMNLNEDSCNKKSNVI | |
| | DNKSGKVTAYDLLSNRVIKKPMSASALFVQDHRPQFLIENPKTSLEDATLQIEEL | |
| | WKTLSEEEKLKYEEKATKDLERYNSQMKRAIEQESQMSLKDGRKKIKPTSAWN | |
| | LAQKHKLKTSLSNQPKLDELLQSQIEKRRSQNIKMVQIPFSMKNLKINEKKQNKV | |
| | DLEEKDEPCLIHNLRFPDAWLMTSKTEVMLLNPYRVEEALLFKRLLENHKLPAEP | |
| | LEKPIMLTESLFNGSHYLDVLYKMTADDQRYSGSTYLSDPRLTANGFKIKLIPGV | |
| | SITENYLEIEGMANCLPFYGVADLKEILNAILNRNAKEVYECRPRKVISYLEGEAV | |
| | RLSRQLPMYLSKEDIQDIIYRMKHQFGNEIKECVHGRPFFHHLTYLPETT | |
| MLH3 | MIKCLSVEVQAKLRSGLAISSLGQCVEELALNSIDAEAKCVAVRVNMETFQVQVI | 227 |
| Homo sapiens | DNGFGMGSDDVEKVGNRYFTSKCHSVQDLENPRFYGFRGEALANIADMASAVE | |
| SwissProt | ISSKKNRTMKTFVKLFQSGKALKACEADVTRASAGTTVTVYNLFYQLPVRRKC | |
| Accession No. | MDPRLEFEKVRQRIEALSLMHPSISFSLRNDVSGSMVLQLPKTKDVCSRFCQIYGL | |
| Q9UHC1 | GKSQKLREISFKYKEFELSGYISSEAHYNKNMQFLFVNKRLVLRTKLHKLIDFLLR | |
| Wild type | KESIICKPKNGPTSRQMNSSLRHRSTPELYGIYVINVQCQFCEYDVCMEPAKTLIE | |
| | FQNWDTLLFCIQEGVKMFLKQEKLFVELSGEDIKEFSEDNGFSLFDATLQKRVTS | |
| | DERSNFQEACNNILDSYEMFNLQSKAVKRKTTAENVNTQSSRDSEATRKNTNDA | |
| | FLYIYESGGPGHSKMTEPSLQNKDSSCSESKMLEQETIVASEAGENEKHKKSFLE | |
| | HSSLENPCGTSLEMFLSPFQTPCHFEESGQDLEIWKESTTVNGMAANILKNNRIQN | |
| | QPKRFKDATEVGCQPLPFATTLWGVHSAQTEKEKKKESSNCGRRNVFSYGRVKL | |
| | CSTGFITHVVQNEKTKSTETEHSFKNYVRPGPTRAQETFGNRTRHSVETPDIKDL | |
| | ASTLSKESGQLPNKKNCRTNISYGLENEPTATYTMFSAFQEGSKKSQTDCILSDTS | |
| | PSFPWYRHVSNDSRKTDKLIGFSKPIVRKKLSLSSQLGSLEKFKRQYGKVENPLD | |
| | TEVEESNGVTTNLSLQVEPDILLKDKNRLENSDVCKITTMEHSDSDSSCQPASHIL | |
| | NSEKFPFSKDEDCLEQQMPSLRESPMTLKELSLFNRKPLDLEKSSESLASKLSRLK | |
| | GSERETQTMGMMSRFNELPNSDSSRKDSKLCSVLTQDFCMLFNNKHEKTENGVI | |
| | PTSDSATQDNSFNKNSKTHSNSNTTENCVISETPLVLPYNNSKVTGKDSDVLIRAS | |
| | EQQIGSLDSPSGMLMNPVEDATGDQNGICFQSEESKARACSETEESNTCCSDWQR | |
| | HFDVALGRMVYVNKMTGLSTFIAPTEDIQAACTKDLTTVAVDVVLENGSQYRC | |
| | QPFRSDLVLPFLPRARAERTVMRQDNRDTVDDTVSSESLQSLFSEWDNPVFARYP | |
| | EVAVDVSSGQAESLAVKIHNILYPYRFTKGMIHSMQVLQQVDNKFIACLMSTKT | |
| | EENGEAGGNLLVLVDQHAAHERIRLEQLIIDSYEKQQAQGSGRKKLLSSTLIPPLE | |
| | ITVTEEQRRLLWCYHKNLEDLGLEFVFPDTSDSLVLVGKVPLCFVEREANELRRG | |
| | RSTVTKSIVEEFIREQLELLQTTGGIQGTLPLTVQKVLASQACHGAIKFNDGLSLQ | |
| | ESCRLIEALSSCQLPFQCAHGRPSMLPLADIDHLEQEKQIKPNLTKLRKMAQAWR | |
| | LFGKAECDTRQSLQQSMPPCEPP | |
| MSH2 | MAVQPKETLQLESAAEVGFVRFFQGMPEKPTTTVRLFDRGDFYTAHGEDALLAA | 228 |
| Homo sapiens | REVFKTQGVIKYMGPAGAKNLQSVVLSKMNFESFVKDLLLVRQYRVEVYKNRA | |
| SwissProt | GNKASKENDWYLAYKASPGNLSQFEDILFGNNDMSASIGVVGVKMSAVDGQRQ | |
| Accession No. | VGVGYVDSIQRKLGLCEFPDNDQFSNLEALLIQIGPKECVLPGGETAGDMGKLRQ | |
| P43246 | IIQRGGILITERKKADFSTKDIYQDLNRLLKGKKGEQMNSAVLPEMENQVAVSSL | |
| Wild type | SAVIKFLELLSDDSNFGQFELTTFDFSQYMKLDIAAVRALNLFQGSVEDTTGSQSL | |
| | AALLNKCKTPQGQRLVNQWIKQPLMDKNRIEERLNLVEAFVEDAELRQTLQEDL | |
| | LRRFPDLNRLAKKFQRQAANLQDCYRLYQGINQLPNVIQALEKHEGKHQKLLLA | |
| | VFVTPLTDLRSDFSKFQEMIETTLDMDQVENHEFLVKPSFDPNLSELREIMNDLE | |
| | KKMQSTLISAARDLGLDPGKQIKLDSSAQFGYYFRVTCKEEKVLRNNKNFSTVDI | |
| | QKNGVKFTNSKLTSLNEEYTKNKTEYEEAQDAIVKEIVNISSGYVEPMQTLNDVL | |
| | AQLDAVVSFAHVSNGAPVPYVRPAILEKGQGRIILKASRHACVEVQDEIAFIPND | |
| | VYFEKDKQMFHIITGPNMGGKSTYIRQTGVIVLMAQIGCFVPCESAEVSIVDCILA | |
| | RVGAGDSQLKGVSTFMAEMLETASILRSATKDSLIIIDELGRGTSTYDGFGLAWAI | |
| | SEYIATKIGAFCMFATHFHELTALANQIPTVNNLHVTALTTEETLTMLYQVKKGV | |
| | CDQSFGIHVAELANFPKHVIECAKQKALELEEFQYIGESQGYDIMEPAAKKCYLE | |
| | REQGEKIIQEFLSKVKQMPFTEMSEENITIKLKQLKAEVIAKNNSFVNEIISRIKVTT | |
| MSH6 | MSRQSTLYSFFPKSPALSDANKASARASREGGRAAAAPGASPSPGGDAAWSEAG | 229 |
| Homo sapiens | PGPRPLARSASPPKAKNLNGGLRRSVAPAAPTSCDFSPGDLVWAKMEGYPWWP | |
| SwissProt | CLVYNHPFDGTFIREKGKSVRVHVQFFDDSPTRGWVSKRLLKPYTGSKSKEAQK | |
| Accession No. | GGHFYSAKPEILRAMQRADEALNKDKIKRLELAVCDEPSEPEEEEEMEVGTTYV | |
| P52701 | TDKSEEDNEIESEEEVQPKTQGSRRSSRQIKKRRVISDSESDIGGSDVEFKPDTKEE | |
| Wild type | GSSDEISSGVGDSESEGLNSPVKVARKRKRMVTGNGSLKRKSSRKETPSATKQAT | |
| | SISSETKNTLRAFSAPQNSESQAHVSGGGDDSSRPTVWYHETLEWLKEEKRRDEH | |
| | RRRPDHPDFDASTLYVPEDFLNSCTPGMRKWWQIKSQNFDLVICYKVGKFYELY | |
| | HMDALIGVSELGLVFMKGNWAHSGFPEIAFGRYSDSLVQKGYKVARVEQTETPE | |
| | MMEARCRKMAHISKYDRVVRREICRIITKGTQTYSVLEGDPSENYSKYLLSLKEK | |
| | EEDSSGHTRAYGVCFVDTSLGKFFIGQFSDDRHCSRFRTLVAHYPPVQVLFEKGN | |
| | LSKETKTILKSSLSCSLQEGLIPGSQFWDASKTLRTLLEEEYFREKLSDGIGVMLPQ | |
| | VLKGMTSESDSIGLTPGEKSELALSALGGCVFYLKKCLIDQELLSMANFEEYIPLD | |
| | SDTVSTTRSGAIFTKAYQRMVLDAVTLNNLEIFLNGTNGSTEGTLLERVDTCHTP | |
| | FGKRLLKQWLCAPLCNHYAINDRLDAIEDLMVVPDKISEVVELLKKLPDLERLLS | |
| | KIHNVGSPLKSQNHPDSRAIMYEETTYSKKKIIDFLSALEGFKVMCKIIGIMEEVA | |
| | DGFKSKILKQVISLQTKNPEGRFPDLTVELNRWDTAFDHEKARKTGLITPKAGFD | |
| | SDYDQALADIRENEQSLLEYLEKQRNRIGCRTIVYWGIGRNRYQLEIPENFTTRNL | |
| | PEEYELKSTKKGCKRYWTKTIEKKLANLINAEERRDVSLKDCMRRLFYNFDKNY | |
| | KDWQSAVECIAVLDVLLCLANYSRGGDGPMCRPVILLPEDTPPFLELKGSRHPCI | |
| | TKTFFGDDFIPNDILIGCEEEEQENGKAYCVLVTGPNMGGKSTLMRQAGLLAVM | |
| | AQMGCYVPAEVCRLTPIDRVFTRLGASDRIMSGESTFFVELSETASILMHATAHS | |
| | LVLVDELGRGTATFDGTAIANAVVKELAETIKCRTLFSTHYHSLVEDYSQNVAV | |
| | RLGHMACMVENECEDPSQETITFLYKFIKGACPKSYGFNAARLANLPEEVIQKGH | |
| | RKAREFEKMNQSLRLFREVCLASERSTVDAEAVHKLLTLIKEL | |
| PCNA | MFEARLVQGSILKKVLEALKDLINEACWDISSSGVNLQSMDSSHVSLVQLTLRSE | 230 |
| Homo sapiens | GFDTYRCDRNLAMGVNLTSMSKILKCAGNEDIITLRAEDNADTLALVFEAPNQE | |
| SwissProt | KVSDYEMKLMDLDVEQLGIPEQEYSCVVKMPSGEFARICRDLSHIGDAVVISCA | |
| Accession No. | KDGVKFSASGELGNGNIKLSQTSNVDKEEEAVTIEMNEPVQLTFALRYLNFFTKA | |
| P12004 | TPLSSTVTLSMSADVPLVVEYKIADMGHLKYYLAPKIEDEEGS | |
| Wild type | | |
| RFC | MDIRKFFGVIPSGKKLVSETVKKNEKTKSDEETLKAKKGIKEIKVNSSRKEDDFK | 231 |
| Homo sapiens | QKQPSKKKRIIYDSDSESEETLQVKNAKKPPEKLPVSSKPGKISRQDPVTYISETDE | |
| SwissProt | EDDFMCKKAASKSKENGRSTNSHLGTSNMKKNEENTKTKNKPLSPIKLTPTSVL | |
| Accession No. | DYFGTGSVQRSNKKMVASKRKELSQNTDESGLNDEAIAKQLQLDEDAELERQL | |
| P35251 | HEDEEFARTLAMLDEEPKTKKARKDTEAGETFSSVQANLSKAEKHKYPHKVKT | |
| Wild type | AQVSDERKSYSPRKQSKYESSKESQQHSKSSADKIGEVSSPKASSKLAIMKRKEE | |
| | SSYKEIEPVASKRKENAIKLKGETKTPKKTKSSPAKKESVSPEDSEKKRTNYQAY | |
| | RSYLNREGPKALGSKEIPKGAENCLEGLIFVITGVLESIERDEAKSLIERYGGKVTG | |
| | NVSKKTNYLVMGRDSGQSKSDKAAALGTKIIDEDGLLNLIRTMPGKKSKYEIAV | |
| | ETEMKKESKLERTPQKNVQGKRKISPSKKESESKKSRPTSKRDSLAKTIKKETDV | |
| | FWKSLDFKEQVAEETSGDSKARNLADDSSENKVENLLWVDKYKPTSLKTIIGQQ | |
| | GDQSCANKLLRWLRNWQKSSSEDKKHAAKFGKFSGKDDGSSFKAALLSGPPGV | |
| | GKTTTASLVCQELGYSYVELNASDTRSKSSLKAIVAESLNNTSIKGFYSNGAASS | |
| | VSTKHALIMDEVDGMAGNEDRGGIQELIGLIKHTKIPIICMCNDRNHPKIRSLVHY | |
| | CFDLRFQRPRVEQIKGAMMSIAFKEGLKIPPPAMNEIILGANQDIRQVLHNLSMW | |
| | CARSKALTYDQAKADSHRAKKDIKMGPFDVARKVFAAGEETAHMSLVDKSDLF | |
| | FHDYSIAPLFVQENYIHVKPVAAGGDMKKHLMLLSRAADSICDGDLVDSQIRSK | |
| | QNWSLLPAQAIYASVLPGELMRGYMTQFPTFPSWLGKHSSTGKHDRIVQDLALH | |
| | MSLRTYSSKRTVNMDYLSLLRDALVQPLTSQGVDGVQDVVALMDTYYLMKED | |
| | FENIMEISSWGGKPSPFSKLDPKVKAAFTRAYNKEAHLTPYSLQAIKASRHSTSPS | |
| | LDSEYNEELNEDDSQSDEKDQDAIETDAMIKKKTKSSKPSKPEKDKEPRKGKGK | |
| | SSKK | |
| EXO1 | MGIQGLLQFIKEASEPIHVRKYKGQVVAVDTYCWLHKGAIACAEKLAKGEPTDR | 156 |
| Homo sapiens | YVGFCMKFVNMLLSHGIKPILVFDGCTLPSKKEVERSRRERRQANLLKGKQLLR | |
| SwissProt | EGKVSEARECFTRSINITHAMAHKVIKAARSQGVDCLVAPYEADAQLAYLNKAG | |
| Accession No. | IVQAIITEDSDLLAFGCKKVILKMDQFGNGLEIDQARLQMCRQLGDVFTEEKFRY | |
| Q9UQ84 | MCILSGCDYLSSLRGIGLAKACKVLRLANNPDIVKVIKKIGHYLKMNITVPEDYIN | |
| Wild type | GFIRANNTFLYQLVFDPIKRKLIPLNAYEDDVDPETLSYAGQYVDDSIALQIALGN | |
| | KDINTFEQIDDYNPDTAMPAHSRSHSWDDKTCQKSANVSSIWHRNYSPRPESGT | |
| | VSDAPQLKENPSTVGVERVISTKGLNLPRKSSIVKRPRSAELSEDDLLSQYSLSFT | |
| | KKTKKNSSEGNKSLSFSEVFVPDLVNGPINKKSVSTPPRTRNKFATFLQRKNEES | |
| | GAVVVPGTRSRFFCSSDSTDCVSNKVSIQPLDETAVTDKENNLHESEYGDQEGKR | |
| | LVDTDVARNSSDDIPNNHIPGDHIPDKATVFTDEESYSFESSKFTRTISPPTLGTLR | |
| | SCFSWSGGLGDFSRTPSPSPSTALQQFRRKSDSPTSLPENNMSDVSQLKSEESSDD | |
| | ESHPLREEACSSQSQESGEFSLQSSNASKLSQCSSKDSDSEESDCNIKLLDSQSDQT | |
| | SKLRLSHFSKKDTPLRNKVPGLYKSSSADSLSTTKIKPLGPARASGLSKKPASIQK | |
| | RKHHNAENKPGLQIKLNELWKNFGFKKDSEKLPPCKKPLSPVRDNIQLTPEAEED | |
| | IFNKPECGRVQRAIFQ | |
| POLδ | MDGKRRPGPGPGVPPKRARGGLWDDDDAPRPSQFEEDLALMEEMEAEHRLQEQ | 232 |
| Homo sapiens | EEEELQSVLEGVADGQVPPSAIDPRWLRPTPPALDPQTEPLIFQQLEIDHYVGPAQ | |
| SwissProt | PVPGGPPPSRGSVPVLRAFGVTDEGFSVCCHIHGFAPYFYTPAPPGFGPEHMGDL | |
| Accession No | QRELNLAISRDSRGGRELTGPAVLAVELCSRESMFGYHGHGPSPFLRITVALPRLV | |
| P28340 | APARRLLEQGIRVAGLGTPSFAPYEANVDFEIRFMVDTDIVGCNWLELPAGKYAL | |
| Wild type | RLKEKATQCQLEADVLWSDVVSHPPEGPWQRIAPLRVLSFDIECAGRKGIFPEPE | |
| | RDPVIQICSLGLRWGEPEPFLRLALTLRPCAPILGAKVQSYEKEEDLLQAWSTFIRI | |
| | MDPDVITGYNIQNFDLPYLISRAQTLKVQTFPFLGRVAGLCSNIRDSSFQSKQTGR | |
| | RDTKVVSMVGRVQMDMLQVLLREYKLRSYTLNAVSFHFLGEQKEDVQHSIITD | |
| | LQNGNDQTRRRLAVYCLKDAYLPLRLLERLMVLVNAVEMARVTGVPLSYLLSR | |
| | GQQVKVVSQLLRQAMHEGLLMPVVKSEGGEDYTGATVIEPLKGYYDVPIATLD | |
| | FSSLYPSIMMAHNLCYTTLLRPGTAQKLGLTEDQFIRTPTGDEFVKTSVRKGLLP | |
| | QILENLLSARKRAKAELAKETDPLRRQVLDGRQLALKVSANSVYGFTGAQVGKL | |
| | PCLEISQSVTGFGRQMIEKTKQLVESKYTVENGYSTSAKVVYGDTDSVMCRFGV | |
| | SSVAEAMALGREAADWVSGHFPSPIRLEFEKVYFPYLLISKKRYAGLLFSSRPDA | |
| | HDRMDCKGLEAVRRDNCPLVANLVTASLRRLLIDRDPEGAVAHAQDVISDLLCN | |
| | RIDISQLVITKELTRAASDYAGKQAHVELAERMRKRDPGSAPSLGDRVPYVIISAA | |
| | KGVAAYMKSEDPLFVLEHSLPIDTQYYLEQQLAKPLLRIFEPILGEGRAEAVLLR | |
| | GDHTRCKTVLTGKVGGLLAFAKRRNCCIGCRTVLSHQGAVCEFCQPRESELYQK | |
| | EVSHLNALEERFSRLWTQCQRCQGSLHEDVICTSRDCPIFYMRKKVRKDLEDQE | |
| | QLLRRFGPPGPEAW | |

[0316] Thus, in one aspect, the present disclosure provides a method for editing a nucleotide molecule (e.g., a genome) using prime editing while blocking, inhibiting, or otherwise inactivating the DNA mismatch repair (MMR) system.

[0317] In another aspect, the present disclosure provides a method for editing a nucleotide molecule (e.g., a genome), comprising contacting a target nucleotide molecule with a prime editor and an inhibitor of the MMR system, e.g., an inhibitor of one or more of MLH1. PMS2 (or MutL alpha). PMS1 (or MutL beta), MLH3 (or MutL gamma), MutS alpha (MSH2-MSH6), MutS beta (MSH2-MSH3), MSH2, MSH6, PCNA, RFC, EXO1, POLδ, or PCNA. In various embodiments, the inhibitor can be a small molecule inhibitor. In other embodiments, the inhibitor can be an antibody, e.g., a neutralizing antibody. In still other embodiments, the inhibitor can be a dominant negative mutant of one or more of MLH1, PMS2 (or MutL alpha), PMS1 (or MutL beta), MLH3 (or MutL gamma), MutS alpha (MSH2-MSH6). MutS beta (MSH2-MSH3), MSH2, MSH6, PCNA, RFC, EXO1, POLδ, or PCNA, e.g., a dominant negative mutant of MLH1. In still other embodiments, the inhibitor can be targeted at the level of transcription, e.g., an siRNA or other nucleic acid agent that knocks down the level of a transcript encoding MLH1, PMS2 (or MutL alpha), PMS1 (or MutL beta), MLH3 (or MutL gamma), MutS alpha (MSH2-MSH6), MutS beta (MSH2-MSH3), MSH2, MSH6, PCNA, RFC, EXO1, POLδ, or PCNA. In yet other embodiments, the step of “contacting a target nucleotide molecule with a prime editor” can include (i) delivering directly to a cell an effective amount of a prime editor fusion protein (e.g., PE1 or PE2) complexed with a lipid delivery system; (ii) delivery to a cell a mRNA or delivery complex comprising an mRNA that encodes a prime editor fusion protein and/or a suitable pegRNA; and (iii) a DNA vector (e.g., an AAV or lentivirus vector, plasmid, or other nucleic acid delivery vector) that encodes a prime editor fusion protein and/or a suitable pegRNA on one or more DNA vectors.

[0318] In still another aspect, the present disclosure provides a method for editing a nucleotide molecule (e.g., a genome) using prime editing while blocking, inhibiting, or otherwise inactivating MLH1 or variant thereof. In another aspect, the present disclosure provides a method for editing a nucleotide molecule (e.g., a genome), comprising contacting a target nucleotide molecule with a prime editor and an inhibitor of MLH1. In various embodiments, the inhibitor can be a small molecule inhibitor. In other embodiments, the inhibitor can be an anti-MLH1 antibody, e.g., a neutralizing antibody that inactivates MLH1. In still other embodiments, the inhibitor can be a dominant negative mutant of MLH1. In still other embodiments, the inhibitor can be targeted at the level of transcription of MLH1, e.g., an siRNA or other nucleic acid agent that knocks down the level of a transcript encoding MLH1. In yet other embodiments, the step of “contacting a target nucleotide molecule with a prime editor” can include (i) delivering directly to a cell an effective amount of a prime editor fusion protein (e.g., PE1 or PE2) complexed with a lipid delivery system; (ii) delivery to a cell a mRNA or delivery complex comprising an mRNA that encodes a prime editor fusion protein and/or a suitable pegRNA; and (iii) a DNA vector (e.g., an AAV or lentivirus vector, plasmid, or other nucleic acid delivery vector) that encodes a prime editor fusion protein and/or a suitable pegRNA on one or more DNA vectors.

[0319] In still another aspect, the present disclosure provides a method for editing a nucleotide molecule (e.g., a genome) using prime editing while blocking, inhibiting, or otherwise inactivating PMS2 (or MutL alpha) or variant thereof. In another aspect, the present disclosure provides a method for editing a nucleotide molecule (e.g., a genome), comprising contacting a target nucleotide molecule with a prime editor and an inhibitor of PMS2 (or MutL alpha). In various embodiments, the inhibitor can be a small molecule inhibitor. In other embodiments, the inhibitor can be an anti-PMS2 (or MutL alpha) antibody, e.g., a neutralizing antibody that inactivates PMS2 (or MutL alpha). In still other embodiments, the inhibitor can be a dominant negative mutant of PMS2 (or MutL alpha). In still other embodiments, the inhibitor can be targeted at the level of transcription of PMS2 (or MutL alpha), e.g., an siRNA or other nucleic acid agent that knocks down the level of a transcript encoding ML PMS2 (or MutL alpha). In yet other embodiments, the step of “contacting a target nucleotide molecule with a prime editor” can include (i) delivering directly to a cell an effective amount of a prime editor fusion protein (e.g., PE1 or PE2) complexed with a lipid delivery system; (ii) delivery to a cell a mRNA or delivery complex comprising an mRNA that encodes a prime editor fusion protein and/or a suitable pegRNA; and (iii) a DNA vector (e.g., an AAV or lentivirus vector, plasmid, or other nucleic acid delivery vector) that encodes a prime editor fusion protein and/or a suitable pegRNA on one or more DNA vectors.

[0320] In still another aspect, the present disclosure provides a method for editing a nucleotide molecule (e.g., a genome) using prime editing while blocking, inhibiting, or otherwise inactivating PMS1 (or MutL beta) or variant thereof. In another aspect, the present disclosure provides a method for editing a nucleotide molecule (e.g., a genome), comprising contacting a target nucleotide molecule with a prime editor and an inhibitor of PMS1 (or MutL beta). In various embodiments, the inhibitor can be a small molecule inhibitor. In other embodiments, the inhibitor can be an anti-PMS1 (or MutL beta) antibody, e.g., a neutralizing antibody that inactivates PMS1 (or MutL beta). In still other embodiments, the inhibitor can be a dominant negative mutant of PMS1 (or MutL beta). In still other embodiments, the inhibitor can be targeted at the level of transcription of PMS1 (or MutL beta), e.g., an siRNA or other nucleic acid agent that knocks down the level of a transcript encoding PMS1 (or MutL beta). In yet other embodiments, the step of “contacting a target nucleotide molecule with a prime editor” can include (i) delivering directly to a cell an effective amount of a prime editor fusion protein (e.g., PE1 or PE2) complexed with a lipid delivery system; (ii) delivery to a cell a mRNA or delivery complex comprising an mRNA that encodes a prime editor fusion protein and/or a suitable pegRNA; and (iii) a DNA vector (e.g., an AAV or lentivirus vector, plasmid, or other nucleic acid delivery vector) that encodes a prime editor fusion protein and/or a suitable pegRNA on one or more DNA vectors.

[0321] In still another aspect, the present disclosure provides a method for editing a nucleotide molecule (e.g., a genome) using prime editing while blocking, inhibiting, or otherwise inactivating MLH3 (or MutL gamma) or variant thereof. In another aspect, the present disclosure provides a method for editing a nucleotide molecule (e.g., a genome), comprising contacting a target nucleotide molecule with a prime editor and an inhibitor of MLH3 (or MutL gamma). In various embodiments, the inhibitor can be a small molecule inhibitor. In other embodiments, the inhibitor can be an anti-MLH3 (or MutL gamma) antibody, e.g., a neutralizing antibody that inactivates MLH3 (or MutL gamma). In still other embodiments, the inhibitor can be a dominant negative mutant of MLH3 (or MutL gamma). In still other embodiments, the inhibitor can be targeted at the level of transcription of P MLH3 (or MutL gamma), e.g., an siRNA or other nucleic acid agent that knocks down the level of a transcript encoding MLH3 (or MutL gamma). In yet other embodiments, the step of “contacting a target nucleotide molecule with a prime editor” can include (i) delivering directly to a cell an effective amount of a prime editor fusion protein (e.g., PE1 or PE2) complexed with a lipid delivery system; (ii) delivery to a cell a mRNA or delivery complex comprising an mRNA that encodes a prime editor fusion protein and/or a suitable pegRNA; and (iii) a DNA vector (e.g., an AAV or lentivirus vector, plasmid, or other nucleic acid delivery vector) that encodes a prime editor fusion protein and/or a suitable pegRNA on one or more DNA vectors.

[0322] In still another aspect, the present disclosure provides a method for editing a nucleotide molecule (e.g., a genome) using prime editing while blocking, inhibiting, or otherwise inactivating MutS alpha (MSH2-MSH6) or variant thereof. In another aspect, the present disclosure provides a method for editing a nucleotide molecule (e.g., a genome), comprising contacting a target nucleotide molecule with a prime editor and an inhibitor of MutS alpha (MSH2-MSH6). In various embodiments, the inhibitor can be a small molecule inhibitor. In other embodiments, the inhibitor can be an anti-MutS alpha (MSH2-MSH6) antibody, e.g., a neutralizing antibody that inactivates MutS alpha (MSH2-MSH6). In still other embodiments, the inhibitor can be a dominant negative mutant of MutS alpha (MSH2-MSH6). In still other embodiments, the inhibitor can be targeted at the level of transcription of MutS alpha (MSH2-MSH6), e.g., an siRNA or other nucleic acid agent that knocks down the level of a transcript encoding MutS alpha (MSH2-MSH6). In yet other embodiments, the step of “contacting a target nucleotide molecule with a prime editor” can include (i) delivering directly to a cell an effective amount of a prime editor fusion protein (e.g., PE1 or PE2) complexed with a lipid delivery system; (ii) delivery to a cell a mRNA or delivery complex comprising an mRNA that encodes a prime editor fusion protein and/or a suitable pegRNA; and (iii) a DNA vector (e.g., an AAV or lentivirus vector, plasmid, or other nucleic acid delivery vector) that encodes a prime editor fusion protein and/or a suitable pegRNA on one or more DNA vectors.

[0323] In still another aspect, the present disclosure provides a method for editing a nucleotide molecule (e.g., a genome) using prime editing while blocking, inhibiting, or otherwise inactivating MSH2 or variant thereof. In another aspect, the present disclosure provides a method for editing a nucleotide molecule (e.g., a genome), comprising contacting a target nucleotide molecule with a prime editor and an inhibitor of MSH2. In various embodiments, the inhibitor can be a small molecule inhibitor. In other embodiments, the inhibitor can be an anti-MSH2 antibody. e.g., a neutralizing antibody that inactivates MSH2. In still other embodiments, the inhibitor can be a dominant negative mutant of MSH2. In still other embodiments, the inhibitor can be targeted at the level of transcription of MSH2, e.g., an siRNA or other nucleic acid agent that knocks down the level of a transcript encoding MSH2. In yet other embodiments, the step of “contacting a target nucleotide molecule with a prime editor” can include (i) delivering directly to a cell an effective amount of a prime editor fusion protein (e.g., PE1 or PE2) complexed with a lipid delivery system; (ii) delivery to a cell a mRNA or delivery complex comprising an mRNA that encodes a prime editor fusion protein and/or a suitable pegRNA; and (iii) a DNA vector (e.g., an AAV or lentivirus vector, plasmid, or other nucleic acid delivery vector) that encodes a prime editor fusion protein and/or a suitable pegRNA on one or more DNA vectors.

[0324] In still another aspect, the present disclosure provides a method for editing a nucleotide molecule (e.g., a genome) using prime editing while blocking, inhibiting, or otherwise inactivating MSH6 or variant thereof. In another aspect, the present disclosure provides a method for editing a nucleotide molecule (e.g., a genome), comprising contacting a target nucleotide molecule with a prime editor and an inhibitor of MS H6. In various embodiments, the inhibitor can be a small molecule inhibitor. In other embodiments, the inhibitor can be an anti-MSH6 antibody, e.g., a neutralizing antibody that inactivates MSH6. In still other embodiments, the inhibitor can be a dominant negative mutant of MSH6. In still other embodiments, the inhibitor can be targeted at the level of transcription of MSH6, e.g., an siRNA or other nucleic acid agent that knocks down the level of a transcript encoding MSH6. In yet other embodiments, the step of “contacting a target nucleotide molecule with a prime editor” can include (i) delivering directly to a cell an effective amount of a prime editor fusion protein (e.g., PE1 or PE2) complexed with a lipid delivery system; (ii) delivery to a cell a mRNA or delivery complex comprising an mRNA that encodes a prime editor fusion protein and/or a suitable pegRNA; and (iii) a DNA vector (e.g., an AAV or lentivirus vector, plasmid, or other nucleic acid delivery vector) that encodes a prime editor fusion protein and/or a suitable pegRNA on one or more DNA vectors.

[0325] In still another aspect, the present disclosure provides a method for editing a nucleotide molecule (e.g., a genome) using prime editing while blocking, inhibiting, or otherwise inactivating PCNA or variant thereof. In another aspect, the present disclosure provides a method for editing a nucleotide molecule (e.g., a genome), comprising contacting a target nucleotide molecule with a prime editor and an inhibitor of PCNA. In various embodiments, the inhibitor can be a small molecule inhibitor. In other embodiments, the inhibitor can be an anti-PCNA antibody, e.g., a neutralizing antibody that inactivates PCNA. In still other embodiments, the inhibitor can be a dominant negative mutant of PCNA. In still other embodiments, the inhibitor can be targeted at the level of transcription of PCNA, e.g., an siRNA or other nucleic acid agent that knocks down the level of a transcript encoding PCNA. In yet other embodiments, the step of “contacting a target nucleotide molecule with a prime editor” can include (i) delivering directly to a cell an effective amount of a prime editor fusion protein (e.g., PE1 or PE2) complexed with a lipid delivery system; (ii) delivery to a cell a mRNA or delivery complex comprising an mRNA that encodes a prime editor fusion protein and/or a suitable pegRNA; and (iii) a DNA vector (e.g., an AAV or lentivirus vector, plasmid, or other nucleic acid delivery vector) that encodes a prime editor fusion protein and/or a suitable pegRNA on one or more DNA vectors.

[0326] In still another aspect, the present disclosure provides a method for editing a nucleotide molecule (e.g., a genome) using prime editing while blocking, inhibiting, or otherwise inactivating RFC or variant thereof. In another aspect, the present disclosure provides a method for editing a nucleotide molecule (e.g., a genome), comprising contacting a target nucleotide molecule with a prime editor and an inhibitor of RFC. In various embodiments, the inhibitor can be a small molecule inhibitor. In other embodiments, the inhibitor can be an anti-RFC antibody, e.g., a neutralizing antibody that inactivates RFC. In still other embodiments, the inhibitor can be a dominant negative mutant of RFC. In still other embodiments, the inhibitor can be targeted at the level of transcription of RFC, e.g., an siRNA or other nucleic acid agent that knocks down the level of a transcript encoding RFC. In yet other embodiments, the step of “contacting a target nucleotide molecule with a prime editor” can include (i) delivering directly to a cell an effective amount of a prime editor fusion protein (e.g., PE1 or PE2) complexed with a lipid delivery system; (ii) delivery to a cell a mRNA or delivery complex comprising an mRNA that encodes a prime editor fusion protein and/or a suitable pegRNA; and (iii) a DNA vector (e.g., an AAV or lentivirus vector, plasmid, or other nucleic acid delivery vector) that encodes a prime editor fusion protein and/or a suitable pegRNA on one or more DNA vectors.

[0327] In still another aspect, the present disclosure provides a method for editing a nucleotide molecule (e.g., a genome) using prime editing while blocking, inhibiting, or otherwise inactivating EXO1 or variant thereof. In another aspect, the present disclosure provides a method for editing a nucleotide molecule (e.g., a genome), comprising contacting a target nucleotide molecule with a prime editor and an inhibitor of EXO1. In various embodiments, the inhibitor can be a small molecule inhibitor. In other embodiments, the inhibitor can be an anti-EXO1 antibody, e.g., a neutralizing antibody that inactivates EXO1. In still other embodiments, the inhibitor can be a dominant negative mutant of EXO1. In still other embodiments, the inhibitor can be targeted at the level of transcription of EXO1, e.g., an siRNA or other nucleic acid agent that knocks down the level of a transcript encoding EXO1. In yet other embodiments, the step of “contacting a target nucleotide molecule with a prime editor” can include (i) delivering directly to a cell an effective amount of a prime editor fusion protein (e.g., PE1 or PE2) complexed with a lipid delivery system; (ii) delivery to a cell a mRNA or delivery complex comprising an mRNA that encodes a prime editor fusion protein and/or a suitable pegRNA; and (iii) a DNA vector (e.g., an AAV or lentivirus vector, plasmid, or other nucleic acid delivery vector) that encodes a prime editor fusion protein and/or a suitable pegRNA on one or more DNA vectors.

[0328] In still another aspect, the present disclosure provides a method for editing a nucleotide molecule (e.g., a genome) using prime editing while blocking, inhibiting, or otherwise inactivating POLδ or variant thereof. In another aspect, the present disclosure provides a method for editing a nucleotide molecule (e.g., a genome), comprising contacting a target nucleotide molecule with a prime editor and an inhibitor of POLδ. In various embodiments, the inhibitor can be a small molecule inhibitor. In other embodiments, the inhibitor can be an anti-POLδ antibody, e.g., a neutralizing antibody that inactivates POLδ. In still other embodiments, the inhibitor can be a dominant negative mutant of POLδ. In still other embodiments, the inhibitor can be targeted at the level of transcription of POLδ, e.g., an siRNA or other nucleic acid agent that knocks down the level of a transcript encoding POLδ. In yet other embodiments, the step of “contacting a target nucleotide molecule with a prime editor” can include (i) delivering directly to a cell an effective amount of a prime editor fusion protein (e.g., PE1 or PE2) complexed with a lipid delivery system; (ii) delivery to a cell a mRNA or delivery complex comprising an mRNA that encodes a prime editor fusion protein and/or a suitable pegRNA; and (iii) a DNA vector (e.g., an AAV or lentivirus vector, plasmid, or other nucleic acid delivery vector) that encodes a prime editor fusion protein and/or a suitable pegRNA on one or more DNA vectors.

[0329] In still other aspects, the present disclosure provides methods for prime editing whereby correction by the MMR pathway of the alterations introduced into a target nucleic acid molecule is evaded, without the need to provide an inhibitor of the MMR pathway. Surprisingly, pegRNAs designed with consecutive nucleotide mismatches compared to a target site on the target nucleic acid, for example, pegRNAs that have three or more consecutive mismatching nucleotides, can evade correction by the MMR pathway, resulting in an increase in prime editing efficiency and/or a decrease in the frequency of indel formation compared to the introduction of a single nucleotide mismatch using prime editing. In addition, insertions and deletions of multiple consecutive nucleotides, for example, three or more contiguous nucleotides, or 10 or more contiguous nucleotides in length introduced by prime editing may also evade correction by the MMR pathway, resulting in an increase in prime editing efficiency and/or a decrease in the frequency of indel formation compared to prime editing with a corresponding control pegRNA (e.g., a control pegRNA that does not introduce insertion or deletion of three or more contiguous nucleotides). In some embodiments, prime editing that introduces insertion or deletion of 10 or more contiguous nucleotides results in an increase in prime editing efficiency and/or a decrease in indel frequency compared to the introduction of an insertion or deletion of less than 10 nucleotides in length using prime editing.

[0330] Thus, in one aspect, the present disclosure provides methods for editing a nucleic acid molecule by prime editing comprising contacting a nucleic acid molecule with a prime editor and a pegRNA comprising a DNA synthesis template on its extension arm comprising three or more consecutive nucleotide mismatches relative to a target site on the nucleic acid molecule. In some embodiments, the pegRNA comprises a DNA synthesis template comprising one or more nucleotide edits compared to the endogenous sequence of the nucleic acid molecule (e.g., a double stranded target DNA) to be edited, wherein the one or more nucleotide edits comprises (i) an intended change is an insertion, deletion, or substitution of x consecutive nucleotides that corrects a mutation (e.g. a disease associated mutation) in the nucleic acid molecule, and (ii) an insertion, deletion, or substitution of y consecutive nucleotides directly adjacent to the x nucleotides, wherein (x+y) is an integer no less than 3. In some embodiments, the insertion, deletion, or substitution of the y consecutive nucleotides is a silent mutation. In some embodiments, the insertion, deletion, or substitution of the y consecutive nucleotides is a benign mutation. The silent mutations may be present in coding regions of the target nucleic acid molecule or in non-coding regions of the target nucleic acid molecule. When the silent mutations are present in a coding region, they introduce into the nucleic acid molecule one or more alternate codons encoding the same amino acid as the unedited nucleic acid molecule. Alternatively, when the silent mutations are in a non-coding region or a junction of a coding region and a non-coding region (e.g., an intron/exon junction), the silent mutations may be present in a region of the nucleic acid molecule that does not influence splicing, gene regulation, RNA lifetime, or other biological properties of the target site on the nucleic acid molecule. A benign mutation may refer to a nucleotide alteration or amino acid alteration that alters the amino acid sequence of the protein or polypeptide encoded by the target nucleic acid sequence, but does not impair or substantively impair expression and/or function of the protein or polypeptide. In some embodiments, x is an integer between 1 and 50. In some embodiments, y is an integer between 1 and 50. In some embodiments, y is an integer no less than 1. In some embodiments, the inclusion of the silent mutation(s) increases the efficiency, reduces unintended indel frequency, and/or improves editing outcome purity by prime editing. As used herein, the term “prime editing outcome purity” may refer to the ratio of intended edit to unintended indels that result from prime editing. In some embodiments, the inclusion of the silent mutation(s) increases the efficiency, reduces unintended indel frequency, and/or improves editing outcome purity by prime editing by at least 1.5-fold, at least 2.0 fold, at least 2.5-fold, at least 3.0-fold, at least 3.5-fold, at least 4.0-fold, at least 4.5-fold, at least 5.0-fold, at least 5.5-fold, at least 6.0-fold, at least 6.5-fold, at least 7.0-fold, at least 7.5-fold, at least 8.0-fold, at least 8.5-fold, at least 9.0-fold, at least 9.5-fold, at least 10.0 fold, at least 11-fold, at least 12-fold, at least 13-fold, at least 14-fold, at least 15-fold, at least 16-fold, at least 17-fold, at least 18-fold, at least 19-fold, at least 20-fold, at least 21-fold, at least 22-fold, at least 23-fold, at least 24-fold, at least 25-fold, at least 26-fold, at least 27-fold, at least 28-fold, at least 29-fold, at least 30-fold, at least 31-fold, at least 32-fold, at least 33-fold, at least 34-fold, at least 35-fold, at least 36-fold, at least 37-fold, at least 38-fold, at least 39-fold, at least 40-fold, at least 41-fold, at least 42-fold, at least 43-fold, at least 44-fold, at least 45-fold, at least 46-fold, at least 47-fold, at least 48-fold, at least 49-fold, at least 50-fold, at least 51-fold, at least 52-fold, at least 53-fold, at least 54-fold, at least 55-fold, at least 56-fold, at least 57-fold, at least 58-fold, at least 59-fold, at least 60-fold, at least 61-fold, at least 62-fold, at least 63-fold, at least 64-fold, at least 65-fold, at least 66-fold, at least 67-fold, at least 68-fold, at least 69-fold, at least 70-fold, at least 71-fold, at least 72-fold, at least 73-fold, at least 74-fold, or at least 75-fold compared to prime editing with a control pegRNA that does not include the silent mutation(s), e.g., a control pegRNA that only includes the insertion, deletion, or substitution of the x consecutive nucleotides and not the insertion, deletion, or substitution of the y consecutive nucleotides.

[0331] In some embodiments, at least one of the three or more consecutive nucleotide mismatches results in an alteration in the amino acid sequence of a protein expressed from the nucleic acid molecule. In some embodiments, more than one of the consecutive nucleotide mismatches results in an alteration in the amino acid sequence of a protein expressed from the nucleic acid molecule. In some embodiments, at least one of the nucleotide mismatches are silent mutations that do not result in an alteration in the amino acid sequence of a protein expressed from the nucleic acid molecule. The silent mutations may be present in coding regions of the target nucleic acid molecule or in non-coding regions of the target nucleic acid molecule. When the silent mutations are present in a coding region, they introduce into the nucleic acid molecule one or more alternate codons encoding the same amino acid as the unedited nucleic acid molecule. Alternatively, when the silent mutations are in a non-coding region, the silent mutations may be present in a region of the nucleic acid molecule that does not influence splicing, gene regulation, RNA lifetime, or other biological properties of the target site on the nucleic acid molecule.

[0332] Any number of consecutive nucleotide mismatches of three or more can be used to achieve the benefits of evading correction by the MMR pathway. In some embodiments, the DNA synthesis template of the extension arm on the pegRNA comprises 3, 4, 5, 6, 7, 8, 9, 10, 11, 12, 13, 14, 15, 16, 17, 18, 19, 20, 21, 22, 23, 24, or 25 consecutive nucleotide mismatches relative to the endogenous sequence of a target site in the nucleic acid molecule edited by prime editing. In some embodiments, the DNA synthesis template of the extension arm on the pegRNA comprises 3, 4, or 5 consecutive nucleotide mismatches relative to the endogenous sequence of a target site in the nucleic acid molecule edited by prime editing. In some embodiments, the DNA synthesis template of the extension arm on the pegRNA comprises 6, 7, 8, 9, 10, 11, 12, 13, 14, 15, 16, 17, 18, 19, or 20 consecutive nucleotide mismatches relative to the endogenous sequence of a target site in the nucleic acid molecule edited by prime editing. In some embodiments, the DNA synthesis template of the extension arm on the pegRNA comprises three or more, four or more, five or more, six or more, seven or more, eight or more, nine or more, or ten or more consecutive nucleotide mismatches relative to a target site on the nucleic acid molecule.

[0333] In another aspect, the present disclosure provides methods for editing a nucleic acid molecule by prime editing comprising contacting a nucleic acid molecule with a prime editor and a pegRNA comprising a DNA synthesis template on its extension arm comprising an insertion or deletion of 10 or more nucleotides relative to a target site on the nucleic acid molecule. Insertions and deletions of 10 or more nucleotides in length evade correction by the MMR pathway when introduced by prime editing and thus can benefit from the inhibition of the MMR pathway without the need to provide an inhibitor of MMR. Insertions and deletions of any length greater than 10 nucleotides can be used to achieve the benefits of evading correction by the MMR pathway. In some embodiments, the DNA synthesis template comprises an insertion or deletion of 10, 11, 12, 13, 14, 15, 16, 17, 18, 19, 20, 21, 22, 23, 24, or 25 nucleotides relative to the endogenous sequence at a target site of the nucleic acid molecule edited by prime editing. In some embodiments, the DNA synthesis template comprises an insertion or deletion of 11 or more nucleotides, 12 or more nucleotides, 13 or more nucleotides, 14 or more nucleotides, 15 or more nucleotides, 16 or more nucleotides, 17 or more nucleotides, 18 or more nucleotides, 19 or more nucleotides, 20 or more nucleotides, 21 or more nucleotides, 22 or more nucleotides, 23 or more nucleotides, 24 or more nucleotides, or 25 or more nucleotides relative to a target site on a nucleic acid molecule. In certain embodiments, the DNA synthesis template comprises an insertion or deletion of 15 or more nucleotides relative to a target site on the nucleic acid molecule.

[0334] The present disclosure provides compositions and methods for prime editing with improved editing efficiency and/or reduced indel formation by inhibiting the DNA mismatch repair pathway while conducting prime editing of a target site. Accordingly, the present disclosure provides a method for editing a nucleic acid molecule by prime editing that involves contacting a nucleic acid molecule with a prime editor, a pegRNA, and an inhibitor of the DNA mismatch repair pathway, thereby installing one or more modifications to the nucleic acid molecule at a target site with increased editing efficiency and/or lower indel formation. The present disclosure further provides polynucleotides for editing a DNA target site by prime editing comprising a nucleic acid sequence encoding a napDNAbp, a polymerase, and an inhibitor of the DNA mismatch repair pathway, wherein the napDNAbp and polymerase is capable in the presence of a pegRNA of installing one or more modifications in the DNA target site with increased editing efficiency and/or lower indel formation. Thus, the methods and compositions described herein utilize prime editors, which may comprise a nucleic acid programmable DNA binding protein (napDNAbp).

Prime Editors: napDNAbp Domain

[0335] In one aspect, a napDNAbp of the prime editors described herein can be associated with or complexed with at least one guide nucleic acid (e.g., guide RNA or a PEgRNA), which localizes the napDNAbp to a DNA sequence that comprises a DNA strand (i.e., a target strand) that is complementary to the guide nucleic acid, or a portion thereof (e.g., the spacer of a guide RNA which anneals to the protospacer of the DNA target). In other words, the guide nucleic-acid “programs” the napDNAbp (e.g., Cas9 or equivalent) to localize and bind to complementary sequence of the protospacer in the DNA.

[0336] Any suitable napDNAbp may be used in the prime editors utilized in the methods and compositions described herein. In various embodiments, the napDNAbp may be any Class 2 CRISPR-Cas system, including any type II, type V, or type VI CRISPR-Cas enzyme. Given the rapid development of CRISPR-Cas as a tool for genome editing, there have been constant developments in the nomenclature used to describe and/or identify CRISPR-Cas enzymes, such as Cas9 and Cas9 orthologs. This application references CRISPR-Cas enzymes with nomenclature that may be old and/or new. The skilled person will be able to identify the specific CRISPR-Cas enzyme being referenced in this Application based on the nomenclature that is used, whether it is old (i.e., “legacy”) or new nomenclature. CRISPR-Cas nomenclature is extensively discussed in Makarova et al., “Classification and Nomenclature of CRISPR-Cas Systems: Where from Here?,” The CRISPR Journal, Vol. 1. No. 5, 2018, the entire contents of which are incorporated herein by reference. The particular CRISPR-Cas nomenclature used in any given instance in this Application is not limiting in any way and the skilled person will be able to identify which CRISPR-Cas enzyme is being referenced.

[0337] For example, the following type II, type V, and type VI Class 2 CRISPR-Cas enzymes have the following art-recognized old (i.e., legacy) and new names. Each of these enzymes, and/or variants thereof, may be used with the prime editors utilized in the methods and compositions described herein:

| | |
|---|---|
| Legacy nomenclature | Current nomenclature* |

type II CRISPR-Cas enzymes

| | |
|---|---|
| Cas9 | same |

type V CRISPR-Cas enzymes

| | |
|---|---|
| Cpf1 | Cas12a |
| CasX | Cas12e |
| C2c1 | Cas12b1 |
| Cas12b2 | same |
| C2c3 | Cas12c |
| CasY | Cas12d |
| C2c4 | same |
| C2c8 | same |
| C2c5 | same |
| C2c10 | same |
| C2c9 | same |

type VI CRISPR-Cas enzymes

| | |
|---|---|
| C2c2 | Cas13a |
| Cas13d | same |
| C2c7 | Cas13c |
| C2c6 | Cas13b |

*See Makarova et al., The CRISPR Journal, Vol. 1, No. 5, 2018

[0338] Without being bound by theory, the mechanism of action of certain napDNAbp contemplated herein includes the step of forming an R-loop whereby the napDNAbp induces the unwinding of a double-strand DNA target, thereby separating the strands in the region bound by the napDNAbp. The guide RNA spacer then hybridizes to the “target strand” at a region that is complementary to the protospacer sequence. This displaces a “non-target strand” that is complementary to the target strand, which forms the single strand region of the R-loop. In some embodiments, the napDNAbp includes one or more nuclease activities, which then cut the DNA leaving various types of lesions. For example, the napDNAbp may comprises a nuclease activity that cuts the non-target strand at a first location, and/or cuts the target strand at a second location. Depending on the nuclease activity, the target DNA can be cut to form a “double-stranded break” whereby both strands are cut. In other embodiments, the target DNA can be cut at only a single site, i.e., the DNA is “nicked” on one strand. Exemplary napDNAbp with different nuclease activities include “Cas9 nickase” (“nCas9”) and a deactivated Cas9 having no nuclease activities (“dead Cas9” or “dCas9”).

[0339] The below description of various napDNAbps which can be used in connection with the prime editors utilized in the presently disclosed methods and compositions is not meant to be limiting in any way. The prime editors may comprise the canonical SpCas9, or any ortholog Cas9 protein, or any variant Cas9 protein—including any naturally occurring variant, mutant, or otherwise engineered version of Cas9—that is known or that can be made or evolved through a directed evolutionary or otherwise mutagenic process. In various embodiments, the Cas9 or Cas9 variants have a nickase activity, i.e., only cleave one strand of the target DNA sequence. In other embodiments, the Cas9 or Cas9 variants have inactive nucleases, i.e., are “dead” Cas9 proteins. Other variant Cas9 proteins that may be used are those having a smaller molecular weight than the canonical SpCas9 (e.g., for easier delivery) or having modified or rearranged primary amino acid structure (e.g., the circular permutant formats).

[0340] The prime editors utilized in the methods and compositions described herein may also comprise Cas9 equivalents, including Cas12a (Cpf1) and Cas12b1 proteins which are the result of convergent evolution. The napDNAbps used herein (e.g., SpCas9, Cas9 variant, or Cas9 equivalents) may also contain various modifications that alter/enhance their PAM specificities. Lastly, the application contemplates any Cas9, Cas9 variant, or Cas9 equivalent which has at least 70%, at least 75%, at least 80%, at least 85%, at least 90%, at least 91%, at least 92%, at least 93%, at least 94%, at least 95%, at least 96%, at least 97%, at least 98%, at least 99%, or at least 99.9% sequence identity to a reference Cas9 sequence, such as a reference SpCas9 canonical sequence or a reference Cas9 equivalent (e.g., Cas12a (Cpf1)).

[0341] The napDNAbp can be a CRISPR (clustered regularly interspaced short palindromic repeat)-associated nuclease. As outlined above, CRISPR is an adaptive immune system that provides protection against mobile genetic elements (viruses, transposable elements, and conjugative plasmids). CRISPR clusters contain spacers, sequences complementary to antecedent mobile elements, and target invading nucleic acids. CRISPR clusters are transcribed and processed into CRISPR RNA (crRNA). In type II CRISPR systems, correct processing of pre-crRNA requires a trans-encoded small RNA (tracrRNA), endogenous ribonuclease 3 (mc), and a Cas9 protein. The tracrRNA serves as a guide for ribonuclease 3-aided processing of pre-crRNA. Subsequently, Cas9/crRNA/tracrRNA endonucleolytically cleaves a linear or circular dsDNA target complementary to the spacer. The target strand not complementary to crRNA is first cut endonucleolytically, then trimmed 3′-5′ exonucleolytically. In nature, DNA-binding and cleavage typically requires protein and both RNAs. However, single guide RNAs (“sgRNA”, or simply “gRNA”) can be engineered so as to incorporate aspects of both the crRNA and tracrRNA into a single RNA species. See, e.g., Jinek M. et al., Science 337:816-821(2012), the entire contents of which is hereby incorporated by reference.

[0342] In some embodiments, the napDNAbp directs cleavage of one or both strands at the location of a target sequence, such as within the target sequence and/or within the complement of the target sequence. In some embodiments, the napDNAbp directs cleavage of one or both strands within about 1, 2, 3, 4, 5, 6, 7, 8, 9, 10, 15, 20, 25, 50, 100, 200, 500, or more base pairs from the first or last nucleotide of a target sequence. In some embodiments, a vector encodes a napDNAbp that is mutated to with respect to a corresponding wild-type enzyme such that the mutated napDNAbp lacks the ability to cleave one or both strands of a target polynucleotide containing a target sequence. For example, an aspartate-to-alanine substitution (D10A) in the RuvC I catalytic domain of Cas9 from S. pyogenes converts Cas9 from a nuclease that cleaves both strands to a nickase (cleaves a single strand). Other examples of mutations that render Cas9 a nickase include, without limitation, H840A, N854A, and N863A in reference to the canonical SpCas9 sequence, or to equivalent amino acid positions in other Cas9 variants or Cas9 equivalents.

[0343] As used herein, the term “Cas protein” refers to a full-length Cas protein obtained from nature, a recombinant Cas protein having a sequences that differs from a naturally occurring Cas protein, or any fragment of a Cas protein that nevertheless retains all or a significant amount of the requisite basic functions needed for the disclosed methods, i.e., (i) possession of nucleic-acid programmable binding of the Cas protein to a target DNA, and (ii) ability to nick the target DNA sequence on one strand. The Cas proteins contemplated herein embrace CRISPR Cas 9 proteins, as well as Cas9 equivalents, variants (e.g., Cas9 nickase (nCas9) or nuclease inactive Cas9 (dCas9)) homologs, orthologs, or paralogs, whether naturally occurring or non-naturally occurring (e.g., engineered or recombinant), and may include a Cas9 equivalent from any Class 2 CRISPR system (e.g., type II, V, VI), including Cas12a (Cpf1), Cas12e (CasX), Cas12b1 (C2c1), Cas12b2, Cas12c (C2c3), C2c4, C2c8, C2c5, C2c10, C2c9 Cas13a (C2c2), Cas13d, Cas13c (C2c7), Cas13b (C2c6), and Cas13b. Further Cas-equivalents are described in Makarova et al., “C2c2 is a single-component programmable RNA-guided RNA-targeting CRISPR effector,” Science 2016; 353(6299) and Makarova et al., “Classification and Nomenclature of CRISPR-Cas Systems: Where from Here?,” The CRISPR Journal, Vol. 1. No. 5, 2018, the contents of which are incorporated herein by reference.

[0344] The terms “Cas9” or “Cas9 nuclease” or “Cas9 moiety” or “Cas9 domain” embrace any naturally occurring Cas9 from any organism, any naturally-occurring Cas9 equivalent or functional fragment thereof, any Cas9 homolog, ortholog, or paralog from any organism, and any mutant or variant of a Cas9, naturally-occurring or engineered. The term Cas9 is not meant to be particularly limiting and may be referred to as a “Cas9 or equivalent.” Exemplary Cas9 proteins are further described herein and/or are described in the art and are incorporated herein by reference. The present disclosure is unlimited with regard to the particular Cas9 that is employed in the prime editors utilized in the methods and compositions described herein.

[0345] As noted herein, Cas9 nuclease sequences and structures are well-known to those of skill in the art (see, e.g., “Complete genome sequence of an M1 strain of Streptococcus pyogenes.” Ferretti et al., J. J., McShan W. M., Ajdic D. J., Savic D. J., Savic G., Lyon K., Primeaux C., Sezate S., Suvorov A. N., Kenton S., Lai H. S., Lin S. P., Qian Y., Jia H. G., Najar F. Z., Ren Q., Zhu H., Song L., White J., Yuan X., Clifton S. W., Roe B. A., McLaughlin R. E., Proc. Natl. Acad. Sci. U.S.A. 98:4658-4663(2001); “CRISPR RNA maturation by trans-encoded small RNA and host factor RNase III.” Deltcheva E., Chylinski K., Sharma C. M., Gonzales K., Chao Y., Pirzada Z. A., Eckert M. R., Vogel J., Charpentier E., Nature 471:602-607(2011); and “A programmable dual-RNA-guided DNA endonuclease in adaptive bacterial immunity.” Jinek M., Chylinski K., Fonfara I., Hauer M., Doudna J. A., Charpentier E. Science 337:816-821(2012), the entire contents of each of which are incorporated herein by reference).

[0346] Examples of Cas9 and Cas9 equivalents are provided as follows; however, these specific examples are not meant to be limiting. The prime editors utilized in the methods and compositions of the present disclosure may use any suitable napDNAbp, including any suitable Cas9 or Cas9 equivalent.

### A. Wild Type Canonical SaCas9

[0347] In one embodiment, the prime editor constructs utilized in the methods and compositions described herein may comprise the “canonical SpCas9” nuclease from S. pyogenes, which has been widely used as a tool for genome engineering and is categorized as the type II subgroup of enzymes of the Class 2 CRISPR-Cas systems. This Cas9 protein is a large, multi-domain protein containing two distinct nuclease domains. Point mutations can be introduced into Cas9 to abolish one or both nuclease activities, resulting in a nickase Cas9 (nCas9) or dead Cas9 (dCas9), respectively, that still retains its ability to bind DNA in a sgRNA-programmed manner. In principle, when fused to another protein or domain, Cas9, or variant thereof (e.g., nCas9) can target that protein to virtually any DNA sequence simply by co-expression with an appropriate sgRNA. As used herein, the canonical SpCas9 protein refers to the wild type protein from Streptococcus pyogenes having the following amino acid sequence:

| | | SEQ |
|---|---|---|
| Description | Sequence | ID NO: |
| SpCas9 | MDKKYSIGLDIGTNSVGWAVITDEYKVPSKKFKVLGNTDRHSIKKNLIGALLED | 2 |
| Streptococcus | SGETAEATRLKRTARRRYTRRKNRICYLQEIFSNEMAKVDDSFFHRLEESELVEE | |
| pyogenes M.1 | DKKHERHPIFGNIVDEVAYHEKYPTIYHLRKKLVDSTDKADLRLIYLALAHMIK | |
| SwissProt | FRGHFLIEGDLNPDNSDVDKLFIQLVQTYNQLFEENPINASGVDAKAILSARLSK | |
| Accession No. | SRRLENLIAQLPGEKKNGLFGNLIALSLGLTPNFKSNFDLAEDAKLQLSKDTYDD | |
| Q99ZW2 | DLDNLLAQIGDQYADLFLAAKNLSDAILLSDILRVNTEITKAPLSASMIKRYDEH | |
| Wild type | HQDLTLLKALVRQQLPEKYKEIFFDQSKNGYAGYIDGGASQEEFYKFIKPILEK | |
| | MDGTEELLVKLNREDLLRKQRTFDNGSIPHQIHLGELHAILRRQEDFYPFLKDN | |
| | REKIEKILTFRIPYYVGPLARGNSRFAWMTRKSEETITPWNFEEVVDKGASAQSF | |
| | IERMTNFDKNLPNEKVLPKHSLLYEYFTVYNELTKVKYVTEGMRKPAFLSGEQ | |
| | KKAIVDLLFKTNRKVTVKQLKEDYFKKIECFDSVEISGVEDRFNASLGTYHDLL | |
| | KIIKDKDFLDNEENEDILEDIVLTLTLFEDREMIEERLKTYAHLFDDKVMKQLKR | |
| | RRYTGWGRLSRKLINGIRDKQSGKTILDFLKSDGFANRNFMQLIHDDSLTFKEDI | |
| | QKAQVSGQGDSLHEHIANLAGSPAIKKGILQTVKVVDELVKVMGRHKPENIVIE | |
| | MARENQTTQKGQKNSRERMKRIEEGIKELGSQILKEHPVENTQLQNEKLYLYYL | |
| | QNGRDMYVDQELDINRLSDYDVDHIVPQSFLKDDSIDNKVLTRSDKNRGKSDN | |
| | VPSEEVVKKMKNYWRQLLNAKLITQRKFDNLTKAERGGLSELDKAGFIKRQLV | |
| | ETRQITKHVAQILDSRMNTKYDENDKLIREVKVITLKSKLVSDFRKDFQFYKVR | |
| | EINNYHHAHDAYLNAVVGTALIKKYPKLESEFVYGDYKVYDVRKMIAKSEQEI | |
| | GKATAKYFFYSNIMNFFKTEITLANGEIRKRPLIETNGETGEIVWDKGRDFATVR | |
| | KVLSMPQVNIVKKTEVQTGGFSKESILPKRNSDKLIARKKDWDPKKYGGFDSPT | |
| | VAYSVLVVAKVEKGKSKKLKSVKELLGITIMERSSFEKNPIDFLEAKGYKEVKK | |
| | DLIIKLPKYSLFELENGRKRMLASAGELQKGNELALPSKYVNFLYLASHYEKLK | |
| | GSPEDNEQKQLFVEQHKHYLDEIIEQISEFSKRVILADANLDKVLSAYNKHRDKP | |
| | IREQAENIIHLFTLTNLGAPAAFKYFDTTIDRKRYTSTKEVLDATLIHQSITGLYET | |
| | RIDLSQLGGD | |
| SpCas9 | ATGGATAAAAAATATAGCATTGGCCTGGATATTGGCACCAACAGCGTGGGC | 3 |
| Reverse | TGGGCGGTGATTACCGATGAATATAAAGTGCCGAGCAAAAAATTTAAAGTG | |
| translation of | CTGGGCAACACCGATCGCCATAGCATTAAAAAAAACCTGATTGGCGCGCTG | |
| SwissProt | CTGTTTGATAGCGGCGAAACCGCGGAAGCGACCCGCCTGAAACGCACCGCG | |
| Accession No. | CGCCGCCGCTATACCCGCCGCAAAAACCGCATTTGCTATCTGCAGGAAATTT | |
| Q99ZW2 | TTAGCAACGAAATGGCGAAAGTGGATGATAGCTTTTTTCATCGCCTGGAAGA | |
| Streptococcus | AAGCTTTCTGGTGGAAGAAGATAAAAAACATGAACGCCATCCGATTTTTGG | |
| pyogenes | CAACATTGTGGATGAAGTGGCGTATCATGAAAAATATCCGACCATTTATCAT | |
| | CTGCGCAAAAAACTGGTGGATAGCACCGATAAAGCGGATCTGCGCCTGATT | |
| | TATCTGGCGCTGGCGCATATGATTAAATTTCGCGGCCATTTTCTGATTGAAG | |
| | GCGATCTGAACCCGGATAACAGCGATGTGGATAAACTGTTTATTCAGCTGGT | |
| | GCAGACCTATAACCAGCTGTTTGAAGAAAACCCGATTAACGCGAGCGGCGT | |
| | GGATGCGAAAGCGATTCTGAGCGCGCGCCTGAGCAAAAGCCGCCGCCTGGA | |
| | AAACCTGATTGCGCAGCTGCCGGGCGAAAAAAAAAACGGCCTGTTTGGCAA | |
| | CCTGATTGCGCTGAGCCTGGGCCTGACCCCGAACTTTAAAAGCAACTTTGAT | |
| | CTGGCGGAAGATGCGAAACTGCAGCTGAGCAAAGATACCTATGATGATGAT | |
| | CTGGATAACCTGCTGGCGCAGATTGGCGATCAGTATGCGGATCTGTTTCTGG | |
| | CGGCGAAAAACCTGAGCGATGCGATTCTGCTGAGCGATATTCTGCGCGTGA | |
| | ACACCGAAATTACCAAAGCGCCGCTGAGCGCGAGCATGATTAAACGCTATG | |
| | ATGAACATCATCAGGATCTGACCCTGCTGAAAGCGCTGGTGCGCCAGCAGC | |
| | TGCCGGAAAAATATAAAGAAATTTTTTTTGATCAGAGCAAAAACGGCTATG | |
| | CGGGCTATATTGATGGCGGCGCGAGCCAGGAAGAATTTTATAAATTTATTAA | |
| | ACCGATTCTGGAAAAAATGGATGGCACCGAAGAACTGCTGGTGAAACTGAA | |
| | CCGCGAAGATCTGCTGCGCAAACAGCGCACCTTTGATAACGGCAGCATTCC | |
| | GCATCAGATTCATCTGGGCGAACTGCATGCGATTCTGCGCCGCCAGGAAGAT | |
| | TTTTATCCGTTTCTGAAAGATAACCGCGAAAAAATTGAAAAAATTCTGACCT | |
| | TTCGCATTCCGTATTATGTGGGCCCGCTGGCGCGCGGCAACAGCCGCTTTGC | |
| | GTGGATGACCCGCAAAAGCGAAGAAACCATTACCCCGTGGAACTTTGAAGA | |
| | AGTGGTGGATAAAGGCGCGAGCGCGCAGAGCTTTATTGAACGCATGACCAA | |
| | CTTTGATAAAAACCTGCCGAACGAAAAAGTGCTGCCGAAACATAGCCTGCT | |
| | GTATGAATATTTTACCGTGTATAACGAACTGACCAAAGTGAAATATGTGACC | |
| | GAAGGCATGCGCAAACCGGCGTTTCTGAGCGGCGAACAGAAAAAAGCGATT | |
| | GTGGATCTGCTGTTTAAAACCAACCGCAAAGTGACCGTGAAACAGCTGAAA | |
| | GAAGATTATTTTAAAAAAATTGAATGCTTTGATAGCGTGGAAATTAGCGGCG | |
| | TGGAAGATCGCTTTAACGCGAGCCTGGGCACCTATCATGATCTGCTGAAAAT | |
| | TATTAAAGATAAAGATTTTCTGGATAACGAAGAAAACGAAGATATTCTGGA | |
| | AGATATTGTGCTGACCCTGACCCTGTTTGAAGATCGCGAAATGATTGAAGAA | |
| | CGCCTGAAAACCTATGCGCATCTGTTTGATGATAAAGTGATGAAACAGCTGA | |
| | AACGCCGCCGCTATACCGGCTGGGGCCGCCTGAGCCGCAAACTGATTAACG | |
| | GCATTCGCGATAAACAGAGCGGCAAAACCATTCTGGATTTTCTGAAAAGCG | |
| | ATGGCTTTGCGAACCGCAACTTTATGCAGCTGATTCATGATGATAGCCTGAC | |
| | CTTTAAAGAAGATATTCAGAAAGCGCAGGTGAGCGGCCAGGGCGATAGCCT | |
| | GCATGAACATATTGCGAACCTGGCGGGCAGCCCGGCGATTAAAAAAGGCAT | |
| | TCTGCAGACCGTGAAAGTGGTGGATGAACTGGTGAAAGTGATGGGCCGCCA | |
| | TAAACCGGAAAACATTGTGATTGAAATGGCGCGCGAAAACCAGACCACCCA | |
| | GAAAGGCCAGAAAAACAGCCGCGAACGCATGAAACGCATTGAAGAAGGCA | |
| | TTAAAGAACTGGGCAGCCAGATTCTGAAAGAACATCCGGTGGAAAACACCC | |
| | AGCTGCAGAACGAAAAACTGTATCTGTATTATCTGCAGAACGGCCGCGATA | |
| | TGTATGTGGATCAGGAACTGGATATTAACCGCCTGAGCGATTATGATGTGGA | |
| | TCATATTGTGCCGCAGAGCTTTCTGAAAGATGATAGCATTGATAACAAAGTG | |
| | CTGACCCGCAGCGATAAAAACCGCGGCAAAAGCGATAACGTGCCGAGCGAA | |
| | GAAGTGGTGAAAAAAATGAAAAACTATTGGCGCCAGCTGCTGAACGCGAAA | |
| | CTGATTACCCAGCGCAAATTTGATAACCTGACCAAAGCGGAACGCGGCGGC | |
| | CTGAGCGAACTGGATAAAGCGGGCTTTATTAAACGCCAGCTGGTGGAAACC | |
| | CGCCAGATTACCAAACATGTGGCGCAGATTCTGGATAGCCGCATGAACACC | |
| | AAATATGATGAAAACGATAAACTGATTCGCGAAGTGAAAGTGATTACCCTG | |
| | AAAAGCAAACTGGTGAGCGATTTTCGCAAAGATTTTCAGTTTTATAAAGTGC | |
| | GCGAAATTAACAACTATCATCATGCGCATGATGCGTATCTGAACGCGGTGGT | |
| | GGGCACCGCGCTGATTAAAAAATATCCGAAACTGGAAAGCGAATTTGTGTA | |
| | TGGCGATTATAAAGTGTATGATGTGCGCAAAATGATTGCGAAAAGCGAACA | |
| | GGAAATTGGCAAAGCGACCGCGAAATATTTTTTTTATAGCAACATTATGAAC | |
| | TTTTTTAAAACCGAAATTACCCTGGCGAACGGCGAAATTCGCAAACGCCCGC | |
| | TGATTGAAACCAACGGCGAAACCGGCGAAATTGTGTGGGATAAAGGCCGCG | |
| | ATTTTGCGACCGTGCGCAAAGTGCTGAGCATGCCGCAGGTGAACATTGTGA | |
| | AAAAAACCGAAGTGCAGACCGGCGGCTTTAGCAAAGAAAGCATTCTGCCGA | |
| | AACGCAACAGCGATAAACTGATTGCGCGCAAAAAAGATTGGGATCCGAAAA | |
| | AATATGGCGGCTTTGATAGCCCGACCGTGGCGTATAGCGTGCTGGTGGTGGC | |
| | GAAAGTGGAAAAAGGCAAAAGCAAAAAACTGAAAAGCGTGAAAGAACTGC | |
| | TGGGCATTACCATTATGGAACGCAGCAGCTTTGAAAAAAACCCGATTGATTT | |
| | TCTGGAAGCGAAAGGCTATAAAGAAGTGAAAAAAGATCTGATTATTAAACT | |
| | GCCGAAATATAGCCTGTTTGAACTGGAAAACGGCCGCAAACGCATGCTGGC | |
| | GAGCGCGGGCGAACTGCAGAAAGGCAACGAACTGGCGCTGCCGAGCAAAT | |
| | ATGTGAACTTTCTGTATCTGGCGAGCCATTATGAAAAACTGAAAGGCAGCCC | |
| | GGAAGATAACGAACAGAAACAGCTGTTTGTGGAACAGCATAAACATTATCT | |
| | GGATGAAATTATTGAACAGATTAGCGAATTTAGCAAACGCGTGATTCTGGC | |
| | GGATGCGAACCTGGATAAAGTGCTGAGCGCGTATAACAAACATCGCGATAA | |
| | ACCGATTCGCGAACAGGCGGAAAACATTATTCATCTGTTTACCCTGACCAAC | |
| | CTGGGCGCGCCGGCGGCGTTTAAATATTTTGATACCACCATTGATCGCAAAC | |
| | GCTATACCAGCACCAAAGAAGTGCTGGATGCGACCCTGATTCATCAGAGCA | |
| | TTACCGGCCTGTATGAAACCCGCATTGATCTGAGCCAGCTGGGCGGCGAT | |

[0348] The prime editors utilized in the methods and compositions described herein may include canonical SpCas9, or any variant thereof having at least 80%, at least 85%, at least 90%, at least 95%, or at least 99% sequence identity with a wild type Cas9 sequence provided above. These variants may include SpCas9 variants containing one or more mutations, including any known mutation reported with the SwissProt Accession No. Q99ZW2 (SEQ ID NO: 2) entry, which include:

| SpCas9 mutation | Function/Characteristic |
|---|---|
| (relative to the amino acid | (as reported) (see UniProtKB- |
| sequence of the canonical | Q99ZW2 (CAS9_STRPT1) |
| SpCas9 sequence, SEQ | entry-incorporated herein by |
| ID NO: 2) | reference) |
| D10A | Nickase mutant which cleaves |
| | the protospacer strand (but no |
| | cleavage of non-protospacer strand) |
| S15A | Decreased DNA cleavage activity |
| R66A | Decreased DNA cleavage activity |
| R70A | No DNA cleavage |
| R74A | Decreased DNA cleavage |
| R78A | Decreased DNA cleavage |
| 97-150 deletion | No nuclease activity |
| R165A | Decreased DNA cleavage |
| 175-307 deletion | About 50% decreased DNA cleavage |
| 312-409 deletion | No nuclease activity |
| E762A | Nickase |
| H840A | Nickase mutant which cleaves |
| | the non-protospacer strand but |
| | does not cleave the protospacer strand |
| N854A | Nickase |
| N863A | Nickase |
| H982A | Decreased DNA cleavage |
| D986A | Nickase |
| 1099-1368 deletion | No nuclease activity |
| R1333A | Reduced DNA binding |

[0349] Other wild type SpCas9 sequences that may be used in the present disclosure, include:

| | | SEQ ID |
|---|---|---|
| Description | Sequence | NO: |
| SpCas9 | ATGGATAAGAAATACTCAATAGGCTTAGATATCGGCACAAATAGCGTCGGAT | 4 |
| Streptococcus | GGGCGGTGATCACTGATGATTATAAGGTTCCGTCTAAAAAGTTCAAGGTTCTG | |
| pyogenes | GGAAATACAGACCGCCACAGTATCAAAAAAAATCTTATAGGGGCTCTTTTATT | |
| MGAS1882 | TGGCAGTGGAGAGACAGCGGAAGCGACTCGTCTCAAACGGACAGCTCGTAGA | |
| wild type | AGGTATACACGTCGGAAGAATCGTATTTGTTATCTACAGGAGATTTTTTCAAA | |
| NC_017053.1 | TGAGATGGCGAAAGTAGATGATAGTTTCTTTCATCGACTTGAAGAGTCTTTTTT | |
| | GGTGGAAGAAGACAAGAAGCATGAACGTCATCCTATTTTTGGAAATATAGTA | |
| | GATGAAGTTGCTTATCATGAGAAATATCCAACTATCTATCATCTGCGAAAAAA | |
| | ATTGGCAGATTCTACTGATAAAGCGGATTTGCGCTTAATCTATTTGGCCTTAGC | |
| | GCATATGATTAAGTTTCGTGGTCATTTTTTGATTGAGGGAGATTTAAATCCTGA | |
| | TAATAGTGATGTGGACAAACTATTTATCCAGTTGGTACAAATCTACAATCAAT | |
| | TATTTGAAGAAAACCCTATTAACGCAAGTAGAGTAGATGCTAAAGCGATTCTT | |
| | TCTGCACGATTGAGTAAATCAAGACGATTAGAAAATCTCATTGCTCAGCTCCC | |
| | CGGTGAGAAGAGAAATGGCTTGTTTGGGAATCTCATTGCTTTGTCATTGGGAT | |
| | TGACCCCTAATTTTAAATCAAATTTTGATTTOGCAGAAGATGCTAAATTACAG | |
| | CTTTCAAAAGATACTTACGATGATGATTTAGATAATTTATTGGCGCAAATTGG | |
| | AGATCAATATGCTGATTTGTTTTTGGCAGCTAAGAATTTATCAGATGCTATTTT | |
| | ACTTTCAGATATCCTAAGAGTAAATAGTGAAATAACTAAGGCTCCCCTATCAG | |
| | CTTCAATGATTAAGCGCTACGATGAACATCATCAAGACTTGACTCTTTTAAAA | |
| | GCTTTAGTTCGACAACAACTTCCAGAAAAGTATAAAGAAATCTTTTTTGATCA | |
| | ATCAAAAAACGGATATGCAGGTTATATTGATGGGGGAGCTAGCCAAGAAGAA | |
| | TTTTATAAATTTATCAAACCAATTTTAGAAAAAATGGATGGTACTGAGGAATT | |
| | ATTGGTGAAACTAAATCGTGAAGATTTGCTGCGCAAGCAACGGACCTTTGACA | |
| | ACGGCTCTATTCCCCATCAAATTCACTTGGGTGAGCTGCATGCTATTTTGAGAA | |
| | GACAAGAAGACTTTTATCCATTTTTAAAAGACAATCGTGAGAAGATTGAAAAA | |
| | ATCTTGACTTTTCGAATTCCTTATTATGTTGGTCCATTGGCGCGTGGCAATAGT | |
| | CGTTTTGCATGGATGACTCGGAAGTCTGAAGAAACAATTACCCCATGGAATTT | |
| | TGAAGAAGTTGTCGATAAAGGTGCTTCAGCTCAATCATTTATTGAACGCATGA | |
| | CAAACTTTGATAAAAATCTTCCAAATGAAAAAGTACTACCAAAACATAGTTTG | |
| | CTTTATGAGTATTTTACGGTTTATAACGAATTGACAAAGGTCAAATATGTTACT | |
| | GAGGGAATGCGAAAACCAGCATTTCTTTCAGGTGAACAGAAGAAAGCCATTG | |
| | TTGATTTACTCTTCAAAACAAATCGAAAAGTAACCGTTAAGCAATTAAAAGAA | |
| | GATTATTTCAAAAAAATAGAATGTTTTGATAGTGTTGAAATTTCAGGAGTTGA | |
| | AGATAGATTTAATGCTTCATTAGGCGCCTACCATGATTTGCTAAAAATTATTA | |
| | AAGATAAAGATTTTTTGGATAATGAAGAAAATGAAGATATCTTAGAGGATATT | |
| | GTTTTAACATTGACCTTATTTGAAGATAGGGGGATGATTGAGGAAAGACTTAA | |
| | AACATATGCTCACCTCTTTGATGATAAGGTGATGAAACAGCTTAAACGTCGCC | |
| | GTTATACTGGTTGGGGACGTTTGTCTCGAAAATTGATTAATGGTATTAGGGAT | |
| | AAGCAATCTGGCAAAACAATATTAGATTTTTTGAAATCAGATGGTTTTGCCAA | |
| | TCGCAATTTTATGCAGCTGATCCATGATGATAGTTTGACATTTAAAGAAGATA | |
| | TTCAAAAAGCACAGGTGTCTGGACAAGGCCATAGTTTACATGAACAGATTGCT | |
| | AACTTAGCTGGCAGTCCTGCTATTAAAAAAGGTATTTTACAGACTGTAAAAAT | |
| | TGTTGATGAACTGGTCAAAGTAATGGGGCATAAGCCAGAAAATATCGTTATTG | |
| | AAATGGCACGTGAAAATCAGACAACTCAAAAGGGCCAGAAAAATTCGCGAGA | |
| | GCGTATGAAACGAATCGAAGAAGGTATCAAAGAATTAGGAAGTCAGATTCTT | |
| | AAAGAGCATCCTGTTGAAAATACTCAATTGCAAAATGAAAAGCTCTATCTCTA | |
| | TTATCTACAAAATGGAAGAGACATGTATGTGGACCAAGAATTAGATATTAATC | |
| | GTTTAAGTGATTATGATGTCGATCACATTGTTCCACAAAGTTTCATTAAAGAC | |
| | GATTCAATAGACAATAAGGTACTAACGCGTTCTGATAAAAATCGTGGTAAATC | |
| | GGATAACGTTCCAAGTGAAGAAGTAGTCAAAAAGATGAAAAACTATTGGAGA | |
| | CAACTTCTAAACGCCAAGTTAATCACTCAACGTAAGTTTGATAATTTAACGAA | |
| | AGCTGAACGTGGAGGTTTGAGTGAACTTGATAAAGCTGGTTTTATCAAACGCC | |
| | AATTGGTTGAAACTCGCCAAATCACTAAGCATGTGGCACAAATTTTGGATAGT | |
| | CGCATGAATACTAAATACGATGAAAATGATAAACTTATTCGAGAGGTTAAAGT | |
| | GATTACCTTAAAATCTAAATTAGTTTCTGACTTCCGAAAAGATTTCCAATTCTA | |
| | TAAAGTACGTGAGATTAACAATTACCATCATGCCCATGATGCGTATCTAAATG | |
| | CCGTCGTTGGAACTGCTTTGATTAAGAAATATCCAAAACTTGAATCGGAGTTT | |
| | GTCTATGGTGATTATAAAGTTTATGATGTTCGTAAAATGATTGCTAAGTCTGA | |
| | GCAAGAAATAGGCAAAGCAACCGCAAAATATTTCTTTTACTCTAATATCATGA | |
| | ACTTCTTCAAAACAGAAATTACACTTGCAAATGGAGAGATTCGCAAACGCCCT | |
| | CTAATCGAAACTAATGGGGAAACTGGAGAAATTGTCTGGGATAAAGGGCGAG | |
| | ATTTTGCCACAGTGCGCAAAGTATTGTCCATGCCCCAAGTCAATATTGTCAAG | |
| | AAAACAGAAGTACAGACAGGCGGATTCTCCAAGGAGTCAATTTTACCAAAAA | |
| | GAAATTCGGACAAGCTTATTGCTCGTAAAAAAGACTGGGATCCAAAAAAATA | |
| | TGGTGGTTTTGATAGTCCAACGGTAGCTTATTCAGTCCTAGTGGTTGCTAAGGT | |
| | GGAAAAAGGGAAATCGAAGAAGTTAAAATCCGTTAAAGAGTTACTAGGGATC | |
| | ACAATTATGGAAAGAAGTTCCTTTGAAAAAAATCCGATTGACTTTTTAGAAGC | |
| | TAAAGGATATAAGGAAGTTAAAAAAGACTTAATCATTAAACTACCTAAATAT | |
| | AGTCTTTTTGAGTTAGAAAACGGTCGTAAACGGATGCTGGCTAGTGCCGGAGA | |
| | ATTACAAAAAGGAAATGAGCTGGCTCTGCCAAGCAAATATGTGAATTTTTTAT | |
| | ATTTAGCTAGTCATTATGAAAAGTTGAAGGGTAGTCCAGAAGATAACGAACA | |
| | AAAACAATTGTTTGTGGAGCAGCATAAGCATTATTTAGATGAGATTATTGAGC | |
| | AAATCAGTGAATTTTCTAAGCGTGTTATTTTAGCAGATGCCAATTTAGATAAA | |
| | GTTCTTAGTGCATATAACAAACATAGAGACAAACCAATACGTGAACAAGCAG | |
| | AAAATATTATTCATTTATTTACGTTGACGAATCTTGGAGCTCCCGCTGCTTTTA | |
| | AATATTTTGATACAACAATTGATCGTAAACGATATACGTCTACAAAAGAAGTT | |
| | TTAGATGCCACTCTTATCCATCAATCCATCACTGGTCTTTATGAAACACGCATT | |
| | GATTTGAGTCAGCTAGGAGOTGACTGA | |
| SpCas9 | MDKKYSIGLDIGTNSVGWAVITDDYKVPSKKFKVLGNTDRHSIKKNLIGALLFGS | 5 |
| Streptococcus | GETAEATRLKRTARRRYTRRKNRICYLQEIFSNEMAKVDDSFFHRLEESFLVEEDK | |
| pyogenes | KHERHPIFGNIVDEVAYHEKYPTIYHLRKKLADSTDKADLRLIYLALAHMIKFRGH | |
| MGAS1882 | FLIEGDLNPDNSDVDKLFIQLVQIYNQLFEENPINASRVDAKAILSARLSKSRRLEN | |
| wild type | LIAQLPGEKRNGLFGNLIALSLGLTPNFKSNFDLAEDAKLQLSKDTYDDDLDNLLA | |
| NC_017053.1 | QIGDQYADLFLAAKNLSDAILLSDILRVNSEITKAPLSASMIKRYDEHHQDLTLLK | |
| | ALVRQQLPEKYKEIFFDQSKNGYAGYIDGGASQEEFYKFIKPILEKMDGTEELLVK | |
| | LNREDLLRKQRTFDNGSIPHQIHLGELHAILRRQEDFYPFLKDNREKIEKILTFRIPY | |
| | YVGPLARGNSRFAWMTRKSEETITPWNFEEVVDKGASAQSFIERMTNEDKNLPNE | |
| | KVLPKHSLLYEYFTVYNELTKVKYVTEGMRKPAFLSGEQKKAIVDLLFKTNRKV | |
| | TVKQLKEDYFKKIECFDSVEISGVEDRFNASLGAYHDLLKIIKDKDFLDNEENEDIL | |
| | EDIVLTLTLFEDRGMIEERLKTYAHLEDDKVMKQLKRRRYTGWGRLSRKLINGIR | |
| | DKQSGKTILDFLKSDGFANRNFMQLIHDDSLTFKEDIQKAQVSGQGHSLHEQIANL | |
| | AGSPAIKKGILQTVKIVDELVKVMGHKPENIVIEMARENQTTQKGQKNSRERMKR | |
| | IEEGIKELGSQILKEHPVENTQLQNEKLYLYYLQNGRDMYVDQELDINRLSDYDV | |
| | DHIVPQSFIKDDSIDNKVLTRSDKNRGKSDNVPSEEVVKKMKNYWRQLLNAKLIT | |
| | QRKFDNLTKAERGGLSELDKAGFIKRQLVETRQITKHVAQILDSRMNTKYDENDK | |
| | LIREVKVITLKSKLVSDFRKDFQFYKVREINNYHHAHDAYLNAVVGTALIKKYPK | |
| | LESEFVYGDYKVYDVRKMIAKSEQEIGKATAKYFFYSNIMNFFKTEITLANGEIRK | |
| | RPLIETNGETGEIVWDKGRDFATVRKVLSMPQVNIVKKTEVQTGGFSKESILPKRN | |
| | SDKLIARKKDWDPKKYGGFDSPTVAYSVLVVAKVEKGKSKKLKSVKELLGITIM | |
| | ERSSFEKNPIDFLEAKGYKEVKKDLIIKLPKYSLFELENGRKRMLASAGELQKGNE | |
| | LALPSKYVNFLYLASHYEKLKGSPEDNEQKQLFVEQHKHYLDEIIEQISEFSKRVIL | |
| | ADANLDKVLSAYNKHRDKPIREQAENIIHLFTLTNLGAPAAFKYEDTTIDRKRYTS | |
| | TKEVLDATLIHQSITGLYETRIDLSQLGGD | |
| SpCas9 | ATGGATAAAAAGTATTCTATTGGTTTAGACATCGGCACTAATTCCGTTGGATG | 6 |
| Streptococcus | GGCTGTCATAACCGATGAATACAAAGTACCTTCAAAGAAATTTAAGGTGTTGG | |
| pyogenes wild | GGAACACAGACCGTCATTCGATTAAAAAGAATCTTATCGGTGCCCTCCTATTC | |
| type | GATAGTGGCGAAACGGCAGAGGCGACTCGCCTGAAACGAACCGCTCGGAGAA | |
| SWBC2D7W014 | GGTATACACGTCGCAAGAACCGAATATGTTACTTACAAGAAATTTTTAGCAAT | |
| | GAGATGGCCAAAGTTGACGATTCTTTCTTTCACCGTTTGGAAGAGTCCTTCCTT | |
| | GTCGAAGAGGACAAGAAACATGAACGGCACCCCATCTTTGGAAACATAGTAG | |
| | ATGAGGTGGCATATCATGAAAAGTACCCAACGATTTATCACCTCAGAAAAAA | |
| | GCTAGTTGACTCAACTGATAAAGCGGACCTGAGGTTAATCTACTTGGCTCTTG | |
| | CCCATATGATAAAGTTCCGTGGGCACTTTCTCATTGAGGGTGATCTAAATCCG | |
| | GACAACTCGGATGTCGACAAACTGTTCATCCAGTTAGTACAAACCTATAATCA | |
| | GTTGTTTGAAGAGAACCCTATAAATGCAAGTGGCGTGGATGCGAAGGCTATTC | |
| | TTAGCGCCCGCCTCTCTAAATCCCGACGGCTAGAAAACCTGATCGCACAATTA | |
| | CCCGGAGAGAAGAAAAATGGGTTGTTCGGTAACCTTATAGCGCTCTCACTAGG | |
| | CCTGACACCAAATTTTAAGTCGAACTTCGACTTAGCTGAAGATGCCAAATTGC | |
| | AGCTTAGTAAGGACACGTACGATGACGATCTCGACAATCTACTGGCACAAATT | |
| | GGAGATCAGTATGCGGACTTATTTTTGGCTGCCAAAAACCTTAGCGATGCAAT | |
| | CCTCCTATCTGACATACTGAGAGTTAATACTGAGATTACCAAGGCGCCGTTAT | |
| | CCGCTTCAATGATCAAAAGGTACGATGAACATCACCAAGACTTGACACTTCTC | |
| | AAGGCCCTAGTCCGTCAGCAACTGCCTGAGAAATATAAGGAAATATTCTTTGA | |
| | TCAGTCGAAAAACGGGTACGCAGGTTATATTGACGGCGGAGCGAGTCAAGAG | |
| | GAATTCTACAAGTTTATCAAACCCATATTAGAGAAGATGGATGGGACGGAAG | |
| | AGTTGCTTGTAAAACTCAATCGCGAAGATCTACTGCGAAAGCAGCGGACTTTC | |
| | GACAACGGTAGCATTCCACATCAAATCCACTTAGGCGAATTGCATGCTATACT | |
| | TAGAAGGCAGGAGGATTTTTATCCGTTCCTCAAAGACAATCGTGAAAAGATTG | |
| | AGAAAATCCTAACCTTTCGCATACCTTACTATGTGGGACCCCTGGCCCGAGGG | |
| | AACTCTCGGTTCGCATGGATGACAAGAAAGTCCGAAGAAACGATTACTCCATG | |
| | GAATTTTGAGGAAGTTGTCGATAAAGGTGCGTCAGCTCAATCGTTCATCGAGA | |
| | GGATGACCAACTTTGACAAGAATTTACCGAACGAAAAAGTATTGCCTAAGCA | |
| | CAGTTTACTTTACGAGTATTTCACAGTGTACAATGAACTCACGAAAGTTAAGT | |
| | ATGTCACTGAGGGCATGCGTAAACCCGCCTTTCTAAGCGGAGAACAGAAGAA | |
| | AGCAATAGTAGATCTGTTATTCAAGACCAACCGCAAAGTGACAGTTAAGCAAT | |
| | TGAAAGAGGACTACTTTAAGAAAATTGAATGCTTCGATTCTGTCGAGATCTCC | |
| | GGGGTAGAAGATCGATTTAATGCGTCACTTGGTACGTATCATGACCTCCTAAA | |
| | GATAATTAAAGATAAGGACTTCCTGGATAACGAAGAGAATGAAGATATCTTA | |
| | GAAGATATAGTGTTGACTCTTACCCTCTTTGAAGATCGGGAAATGATTGAGGA | |
| | AAGACTAAAAACATACGCTCACCTGTTCGACGATAAGGTTATGAAACAGTTAA | |
| | AGAGGCGTCGCTATACGGGCTGGGGACGATTGTCGCGGAAACTTATCAACGG | |
| | GATAAGAGACAAGCAAAGTGGTAAAACTATTCTCGATTTTCTAAAGAGCGAC | |
| | GGCTTCGCCAATAGGAACTTTATGCAGCTGATCCATGATGACTCTTTAACCTTC | |
| | AAAGAGGATATACAAAAGGCACAGGTTTCCGGACAAGGGGACTCATTGCACG | |
| | AACATATTGCGAATCTTGCTGGTTCGCCAGCCATCAAAAAGGGCATACTCCAG | |
| | ACAGTCAAAGTAGTGGATGAGCTAGTTAAGGTCATGGGACGTCACAAACCGG | |
| | AAAACATTGTAATCGAGATGGCACGCGAAAATCAAACGACTCAGAAGGGGCA | |
| | AAAAAACAGTCGAGAGCGGATGAAGAGAATAGAAGAGGGTATTAAAGAACT | |
| | GGGCAGCCAGATCTTAAAGGAGCATCCTGTGGAAAATACCCAATTGCAGAAC | |
| | GAGAAACTTTACCTCTATTACCTACAAAATGGAAGGGACATGTATGTTGATCA | |
| | GGAACTGGACATAAACCGTTTATCTGATTACGACGTCGATCACATTGTACCCC | |
| | AATCCTTTTTGAAGGACGATTCAATCGACAATAAAGTGCTTACACGCTCGGAT | |
| | AAGAACCGAGGGAAAAGTGACAATGTTCCAAGCGAGGAAGTCGTAAAGAAA | |
| | ATGAAGAACTATTGGCGGCAGCTCCTAAATGCGAAACTGATAACGCAAAGAA | |
| | AGTTCGATAACTTAACTAAAGCTGAGAGGGGTGGCTTGTCTGAACTTGACAAG | |
| | GCCGGATTTATTAAACGTCAGCTCGTGGAAACCCGCCAAATCACAAAGCATGT | |
| | TGCACAGATACTAGATTCCCGAATGAATACGAAATACGACGAGAACGATAAG | |
| | CTGATTCGGGAAGTCAAAGTAATCACTTTAAAGTCAAAATTGGTGTCGGACTT | |
| | CAGAAAGGATTTTCAATTCTATAAAGTTAGGGAGATAAATAACTACCACCATG | |
| | CGCACGACGCTTATCTTAATGCCGTCGTAGGGACCGCACTCATTAAGAAATAC | |
| | CCGAAGCTAGAAAGTGAGTTTGTGTATGGTGATTACAAAGTTTATGACGTCCG | |
| | TAAGATGATCGCGAAAAGCGAACAGGAGATAGGCAAGGCTACAGCCAAATAC | |
| | TTCTTTTATTCTAACATTATGAATTTCTTTAAGACGGAAATCACTCTGGCAAAC | |
| | GGAGAGATACGCAAACGACCTTTAATTGAAACCAATGGGGAGACAGGTGAAA | |
| | TCGTATGGGATAAGGGCCGGGACTTCGCGACGGTGAGAAAAGTTTTGTCCATG | |
| | CCCCAAGTCAACATAGTAAAGAAAACTGAGGTGCAGACCGGAGGGTTTTCAA | |
| | AGGAATCGATTCTTCCAAAAAGGAATAGTGATAAGCTCATCGCTCGTAAAAA | |
| | GGACTGGGACCCGAAAAAGTACGGTGGCTTCGATAGCCCTACAGTTGCCTATT | |
| | CTGTCCTAGTAGTGGCAAAAGTTGAGAAGGGAAAATCCAAGAAACTGAAGTC | |
| | AGTCAAAGAATTATTGGGGATAACGATTATGGAGCGCTCGTCTTTTGAAAAGA | |
| | ACCCCATCGACTTCCTTGAGGCGAAAGGTTACAAGGAAGTAAAAAAGGATCT | |
| | CATAATTAAACTACCAAAGTATAGTCTGTTTGAGTTAGAAAATGGCCGAAAAC | |
| | GGATGTTGGCTAGCGCCGGAGAGCTTCAAAAGGGGAACGAACTCGCACTACC | |
| | GTCTAAATACGTGAATTTCCTGTATTTAGCGTCCCATTACGAGAAGTTGAAAG | |
| | GTTCACCTGAAGATAACGAACAGAAGCAACTTTTTGTTGAGCAGCACAAACAT | |
| | TATCTCGACGAAATCATAGAGCAAATTTCGGAATTCAGTAAGAGAGTCATCCT | |
| | AGCTGATGCCAATCTGGACAAAGTATTAAGCGCATACAACAAGCACAGGGAT | |
| | AAACCCATACGTGAGCAGGCGGAAAATATTATCCATTTGTTTACTCTTACCAA | |
| | CCTCGGCGCTCCAGCCGCATTCAAGTATTTTGACACAACGATAGATCGCAAAC | |
| | GATACACTTCTACCAAGGAGGTGCTAGACGCGACACTGATTCACCAATCCATC | |
| | ACGGGATTATATGAAACTCGGATAGATTTGTCACAGCTTGGGGGTGACGGATC | |
| | CCCCAAGAAGAAGAGGAAAGTCTCGAGCGACTACAAAGACCATGACGGTGAT | |
| | TATAAAGATCATGACATCGATTACAAGGATGACGATGACAAGGCTGCAGGA | |
| SpCas9 | MDKKYSIGLDIGTNSVGWAVITDEYKVPSKKFKVLGNTDRHSIKKNLIGALLFDS | 7 |
| Streptococcus | GETAEATRLKRTARRRYTRRKNRICYLQEIFSNEMAKVDDSFFHRLEESFLVEEDK | |
| pyogenes wild | KHERHPIFGNIVDEVAYHEKYPTIYHLRKKLVDSTDKADLRLIYLALAHMIKFRGH | |
| type | FLIEGDLNPDNSDVDKLFIQLVQTYNQLFEENPINASGVDAKAILSARLSKSRRLEN | |
| Encoded product | LIAQLPGEKKNGLFGNLIALSLGLTPNFKSNEDLAEDAKLQLSKDTYDDDLDNLL | |
| of | AQIGDQYADLFLAAKNLSDAILLSDILRVNTEITKAPLSASMIKRYDEHHQDLTLL | |
| SWBC2D7W014 | KALVRQQLPEKYKEIFFDQSKNGYAGYIDGGASQEEFYKFIKPILEKMDGTEELLV | |
| | KLNREDLLRKQRTEDNGSIPHQIHLGELHAILRRQEDFYPFLKDNREKIEKILTFRIP | |
| | YYVGPLARGNSRFAWMTRKSEETITPWNFEEVVDKGASAQSFIERMTNFDKNLP | |
| | NEKVLPKHSLLYEYFTVYNELTKVKYVTEGMRKPAFLSGEQKKAIVDLLFKTNR | |
| | KVTVKQLKEDYFKKIECFDSVEISGVEDRFNASLGTYHDLLKIIKDKDFLDNEENE | |
| | DILEDIVLTLTLFEDREMIEERLKTYAHLEDDKVMKQLKRRRYTGWGRLSRKLIN | |
| | GIRDKQSGKTILDFLKSDGFANRNFMQLIHDDSLTFKEDIQKAQVSGQGDSLHEHI | |
| | ANLAGSPAIKKGILQTVKVVDELVKVMGRHKPENIVIEMARENQTTQKGQKNSR | |
| | ERMKRIEEGIKELGSQILKEHPVENTQLQNEKLYLYYLQNGRDMYVDQELDINRL | |
| | SDYDVDHIVPQSFLKDDSIDNKVLTRSDKNRGKSDNVPSEEVVKKMKNYWRQLL | |
| | NAKLITQRKFDNLTKAERGGLSELDKAGFIKRQLVETRQITKHVAQILDSRMNTK | |
| | YDENDKLIREVKVITLKSKLVSDFRKDFQFYKVREINNYHHAHDAYLNAVVGTA | |
| | LIKKYPKLESEFVYGDYKVYDVRKMIAKSEQEIGKATAKYFFYSNIMNFFKTEITL | |
| | ANGEIRKRPLIETNGETGEIVWDKGRDFATVRKVLSMPQVNIVKKTEVQTGGFSK | |
| | ESILPKRNSDKLIARKKDWDPKKYGGFDSPTVAYSVLVVAKVEKGKSKKLKSVK | |
| | ELLGITIMERSSFEKNPIDFLEAKGYKEVKKDLIIKLPKYSLFELENGRKRMLASAG | |
| | ELQKGNELALPSKYVNFLYLASHYEKLKGSPEDNEQKQLFVEQHKHYLDEIIEQIS | |
| | EFSKRVILADANLDKVLSAYNKHRDKPIREQAENIIHLFTLTNLGAPAAFKYEDTTI | |
| | DRKRYTSTKEVLDATLIHQSITGLYETRIDLSQLGGDGSPKKKRKVSSDYKDHDG | |
| | DYKDHDIDYKDDDDKAAG | |
| SpCas9 | ATGGATAAGAAATACTCAATAGGCTTAGATATCGGCACAAATAGCGTCGGAT | 8 |
| Streptococcus | GGGCGGTGATCACTGATGAATATAAGGTTCCGTCTAAAAAGTTCAAGGTTCTG | |
| pyogenes | GGAAATACAGACCGCCACAGTATCAAAAAAAATCTTATAGGGGCTCTTTTATT | |
| MIGAS wild | TGACAGTGGAGAGACAGCGGAAGCGACTCGTCTCAAACGGACAGCTCGTAGA | |
| type | AGGTATACACGTCGGAAGAATCGTATTTGTTATCTACAGGAGATTTTTTCAAA | |
| NC_002737.2 | TGAGATGGCGAAAGTAGATGATAGTTTCTTTCATCGACTTGAAGAGTCTTTTTT | |
| | GGTGGAAGAAGACAAGAAGCATGAACGTCATCCTATTTTTGGAAATATAGTA | |
| | GATGAAGTTGCTTATCATGAGAAATATCCAACTATCTATCATCTGCGAAAAAA | |
| | ATTGGTAGATTCTACTGATAAAGCGGATTTGCGCTTAATCTATTTGGCCTTAGC | |
| | GCATATGATTAAGTTTCGTGGTCATTTTTTGATTGAGGGAGATTTAAATCCTGA | |
| | TAATAGTGATGTGGACAAACTATTTATCCAGTTGGTACAAACCTACAATCAAT | |
| | TATTTGAAGAAAACCCTATTAACGCAAGTGGAGTAGATGCTAAAGCGATTCTT | |
| | TCTGCACGATTGAGTAAATCAAGACGATTAGAAAATCTCATTGCTCAGCTCCC | |
| | CGGTGAGAAGAAAAATGGCTTATTTGGGAATCTCATTGCTTTGTCATTGGGTT | |
| | TGACCCCTAATTTTAAATCAAATTTTGATTTGGCAGAAGATGCTAAATTACAG | |
| | CTTTCAAAAGATACTTACGATGATGATTTAGATAATTTATTGGCGCAAATTGG | |
| | AGATCAATATGCTGATTTGTTTTTGGCAGCTAAGAATTTATCAGATGCTATTTT | |
| | ACTTTCAGATATCCTAAGAGTAAATACTGAAATAACTAAGGCTCCCCTATCAG | |
| | CTTCAATGATTAAACGCTACGATGAACATCATCAAGACTTGACTCTTTTAAAA | |
| | GCTTTAGTTCGACAACAACTTCCAGAAAAGTATAAAGAAATCTTTTTTGATCA | |
| | ATCAAAAAACGGATATGCAGGTTATATTGATGGGGGAGCTAGCCAAGAAGAA | |
| | TTTTATAAATTTATCAAACCAATTTTAGAAAAAATGGATGGTACTGAGGAATT | |
| | ATTGGTGAAACTAAATCGTGAAGATTTGCTGCGCAAGCAACGGACCTTTGACA | |
| | ACGGCTCTATTCCCCATCAAATTCACTTGGGTGAGCTGCATGCTATTTTGAGAA | |
| | GACAAGAAGACTTTTATCCATTTTTAAAAGACAATCGTGAGAAGATTGAAAAA | |
| | ATCTTGACTTTTCGAATTCCTTATTATGTTGGTCCATTGGCGCGTGGCAATAGT | |
| | CGTTTTGCATGGATGACTCGGAAGTCTGAAGAAACAATTACCCCATGGAATTT | |
| | TGAAGAAGTTGTCGATAAAGGTGCTTCAGCTCAATCATTTATTGAACGCATGA | |
| | CAAACTTTGATAAAAATCTTCCAAATGAAAAAGTACTACCAAAACATAGTTTG | |
| | CTTTATGAGTATTTTACGGTTTATAACGAATTGACAAAGGTCAAATATGTTACT | |
| | GAAGGAATGCGAAAACCAGCATTTCTTTCAGGTGAACAGAAGAAAGCCATTG | |
| | TTGATTTACTCTTCAAAACAAATCGAAAAGTAACCGTTAAGCAATTAAAAGAA | |
| | GATTATTTCAAAAAAATAGAATGTTTTGATAGTGTTGAAATTTCAGGAGTTGA | |
| | AGATAGATTTAATGCTTCATTAGGTACCTACCATGATTTGCTAAAAATTATTAA | |
| | AGATAAAGATTTTTTGGATAATGAAGAAAATGAAGATATCTTAGAGGATATTG | |
| | TTTTAACATTGACCTTATTTGAAGATAGGGAGATGATTGAGGAAAGACTTAAA | |
| | ACATATGCTCACCTCTTTGATGATAAGGTGATGAAACAGCTTAAACGTCGCCG | |
| | TTATACTGGTTGGGGACGTTTGTCTCGAAAATTGATTAATGGTATTAGGGATA | |
| | AGCAATCTGGCAAAACAATATTAGATTTTTTGAAATCAGATGGTTTTGCCAAT | |
| | CGCAATTTTATGCAGCTGATCCATGATGATAGTTTGACATTTAAAGAAGACAT | |
| | TCAAAAAGCACAAGTGTCTGGACAAGGCGATAGTTTACATGAACATATTGCA | |
| | AATTTAGCTGGTAGCCCTGCTATTAAAAAAGGTATTTTACAGACTGTAAAAGT | |
| | TGTTGATGAATTGGTCAAAGTAATGGGGCGGCATAAGCCAGAAAATATCGTTA | |
| | TTGAAATGGCACGTGAAAATCAGACAACTCAAAAGGGCCAGAAAAATTCGCG | |
| | AGAGCGTATGAAACGAATCGAAGAAGGTATCAAAGAATTAGGAAGTCAGATT | |
| | CTTAAAGAGCATCCTGTTGAAAATACTCAATTGCAAAATGAAAAGCTCTATCT | |
| | CTATTATCTCCAAAATGGAAGAGACATGTATGTGGACCAAGAATTAGATATTA | |
| | ATCGTTTAAGTGATTATGATGTCGATCACATTGTTCCACAAAGTTTCCTTAAAG | |
| | ACGATTCAATAGACAATAAGGTCTTAACGCGTTCTGATAAAAATCGTGGTAAA | |
| | TCGGATAACGTTCCAAGTGAAGAAGTAGTCAAAAAGATGAAAAACTATTGGA | |
| | GACAACTTCTAAACGCCAAGTTAATCACTCAACGTAAGTTTGATAATTTAACG | |
| | AAAGCTGAACGTGGAGGTTTGAGTGAACTTGATAAAGCTGGTTTTATCAAACG | |
| | CCAATTGGTTGAAACTCGCCAAATCACTAAGCATGTGGCACAAATTTTGGATA | |
| | GTCGCATGAATACTAAATACGATGAAAATGATAAACTTATTCGAGAGGTTAAA | |
| | GTGATTACCTTAAAATCTAAATTAGTTTCTGACTTCCGAAAAGATTTCCAATTC | |
| | TATAAAGTACGTGAGATTAACAATTACCATCATGCCCATGATGCGTATCTAAA | |
| | TGCCGTCGTTGGAACTGCTTTGATTAAGAAATATCCAAAACTTGAATCGGAGT | |
| | TTGTCTATGGTGATTATAAAGTTTATGATGTTCGTAAAATGATTGCTAAGTCTG | |
| | AGCAAGAAATAGGCAAAGCAACCGCAAAATATTTCTTTTACTCTAATATCATG | |
| | AACTTCTTCAAAACAGAAATTACACTTGCAAATGGAGAGATTCGCAAACGCCC | |
| | TCTAATCGAAACTAATGGGGAAACTGGAGAAATTGTCTGGGATAAAGGGCGA | |
| | GATTTTGCCACAGTGCGCAAAGTATTGTCCATGCCCCAAGTCAATATTGTCAA | |
| | GAAAACAGAAGTACAGACAGGCGGATTCTCCAAGGAGTCAATTTTACCAAAA | |
| | AGAAATTCGGACAAGCTTATTGCTCGTAAAAAAGACTGGGATCCAAAAAAAT | |
| | ATGGTGGTTTTGATAGTCCAACGGTAGCTTATTCAGTCCTAGTGGTTGCTAAG | |
| | GTGGAAAAAGGGAAATCGAAGAAGTTAAAATCCGTTAAAGAGTTACTAGGGA | |
| | TCACAATTATGGAAAGAAGTTCCTTTGAAAAAAATCCGATTGACTTTTTAGAA | |
| | GCTAAAGGATATAAGGAAGTTAAAAAAGACTTAATCATTAAACTACCTAAAT | |
| | ATAGTCTTTTTGAGTTAGAAAACGGTCGTAAACGGATGCTGGCTAGTGCCGGA | |
| | GAATTACAAAAAGGAAATGAGCTGGCTCTGCCAAGCAAATATGTGAATTTTTT | |
| | ATATTTAGCTAGTCATTATGAAAAGTTGAAGGGTAGTCCAGAAGATAACGAAC | |
| | AAAAACAATTGTTTGTGGAGCAGCATAAGCATTATTTAGATGAGATTATTGAG | |
| | CAAATCAGTGAATTTTCTAAGCGTGTTATTTTAGCAGATGCCAATTTAGATAA | |
| | AGTTCTTAGTGCATATAACAAACATAGAGACAAACCAATACGTGAACAAGCA | |
| | GAAAATATTATTCATTTATTTACGTTGACGAATCTTGGAGCTCCCGCTGCTTTT | |
| | AAATATTTTGATACAACAATTGATCGTAAACGATATACGTCTACAAAAGAAGT | |
| | TTTAGATGCCACTCTTATCCATCAATCCATCACTGGTCTTTATGAAACACGCAT | |
| | TGATTTGAGTCAGCTAGGAGGTGACTGA | |
| SpCas9 | MDKKYSIGLDIGTNSVGWAVITDEYKVPSKKFKVLGNTDRHSIKKNLIGALLEDS\| | 2 |
| Streptococcus | GETAEATRLKRTARRRYTRRKNRICYLQEIFSNEMAKVDDSFFHRLEESFLVEEDK | |
| pyogenes | KHERHPIFGNIVDEVAYHEKYPTIYHLRKKLVDSTDKADLRLIYLALAHMIKFRGH | |
| MIGAS wild | FLIEGDLNPDNSDVDKLFIQLVQTYNQLFEENPINASGVDAKAILSARLSKSRRLEN | |
| type | LIAQLPGEKKNGLFGNLIALSLGLTPNFKSNEDLAEDAKLQLSKDTYDDDLDNLL | |
| Encoded product | AQIGDQYADLFLAAKNLSDAILLSDILRVNTEITKAPLSASMIKRYDEHHQDLTLL | |
| of NC_002737.2 | KALVRQQLPEKYKEIFFDQSKNGYAGYIDGGASQEEFYKFIKPILEKMDGTEELLV | |
| (100% identical | KLNREDLLRKQRTEDNGSIPHQIHLGELHAILRRQEDFYPFLKDNREKIEKILTFRIP | |
| to the canonical | YYVGPLARGNSRFAWMTRKSEETITPWNFEEVVDKGASAQSFIERMTNFDKNLP | |
| Q99ZW2 | NEKVLPKHSLLYEYFTVYNELTKVKYVTEGMRKPAFLSGEQKKAIVDLLFKTNR | |
| wild type) | KVTVKQLKEDYFKKIECFDSVEISGVEDRFNASLGTYHDLLKIIKDKDFLDNEENE | |
| | DILEDIVLTLTLFEDREMIEERLKTYAHLEDDKVMKQLKRRRYTGWGRLSRKLIN | |
| | GIRDKQSGKTILDFLKSDGFANRNFMQLIHDDSLTFKEDIQKAQVSGQGDSLHEHI | |
| | ANLAGSPAIKKGILQTVKVVDELVKVMGRHKPENIVIEMARENQTTQKGQKNSR | |
| | ERMKRIEEGIKELGSQILKEHPVENTQLQNEKLYLYYLQNGRDMYVDQELDINRL | |
| | SDYDVDHIVPQSFLKDDSIDNKVLTRSDKNRGKSDNVPSEEVVKKMKNYWRQLL | |
| | NAKLITQRKFDNLTKAERGGLSELDKAGFIKRQLVETRQITKHVAQILDSRMNTK | |
| | YDENDKLIREVKVITLKSKLVSDFRKDFQFYKVREINNYHHAHDAYLNAVVGTA | |
| | LIKKYPKLESEFVYGDYKVYDVRKMIAKSEQEIGKATAKYFFYSNIMNFFKTEITL | |
| | ANGEIRKRPLIETNGETGEIVWDKGRDFATVRKVLSMPQVNIVKKTEVQTGGFSK | |
| | ESILPKRNSDKLIARKKDWDPKKYGGFDSPTVAYSVLVVAKVEKGKSKKLKSVK | |
| | ELLGITIMERSSFEKNPIDFLEAKGYKEVKKDLIIKLPKYSLFELENGRKRMLASAG | |
| | ELQKGNELALPSKYVNFLYLASHYEKLKGSPEDNEQKQLFVEQHKHYLDEIIEQIS | |
| | EFSKRVILADANLDKVLSAYNKHRDKPIREQAENIIHLFTLTNLGAPAAFKYFDTTI | |
| | DRKRYTSTKEVLDATLIHQSITGLYETRIDLSQLGGD | |

[0350] The prime editors utilized in the methods and compositions described herein may include any of the above SpCas9 sequences, or any variant thereof having at least 80%, at least 85%, at least 90%, at least 95%, or at least 99% sequence identity thereto.

### B. Wild Type Cas9 Orthologs

[0351] In other embodiments, the Cas9 protein can be a wild type Cas9 ortholog from another bacterial species different from the canonical Cas9 from S. pyogenes. For example, the following Cas9 orthologs can be used in connection with the prime editor constructs utilized in the methods and compositions described in this specification. In addition, any variant Cas9 orthologs having at least 80%, at least 85%, at least 90%, at least 95%, or at least 99% sequence identity to any of the below orthologs may also be used with the prime editors.

| Description | Sequence |
|---|---|
| LfCas9 | MKEYHIGLDIGTSSIGWAVTDSQFKLMRIKGKTAIGVRLFEEGKTAAERRTFRTTRRRLKR |
| Lactobacillus | RKWRLHYLDEIFAPHLQEVDENFLRRLKQSNIHPEDPTKNQAFIGKLLFPDLLKKNERGYP |
| fermentum wild | TLIKMRDELPVEQRAHYPVMNIYKLREAMINEDRQFDLREVYLAVHHIVKYRGHFLNNA |
| type | SVDKFKVGRIDFDKSFNVLNEAYEELQNGEGSFTIEPSKVEKIGQLLLDTKMRKLDRQKA |
| GenBank: | VAKLLEVKVADKEETKRNKQIATAMSKLVLGYKADFATVAMANGNEWKIDLSSETSED |
| SNX31424.11 | EIEKFREELSDAQNDILTEITSLFSQIMLNEIVPNGMSISESMMDRYWTHERQLAEVKEYLA |
| | TQPASARKEFDQVYNKYIGQAPKERGFDLEKGLKKILSKKENWKEIDELLKAGDELPKQR |
| | TSANGVIPHQMHQQELDRIIEKQAKYYPWLATENPATGERDRHQAKYELDQLVSFRIPYY |
| | VGPLVTPEVQKATSGAKFAWAKRKEDGEITPWNLWDKIDRAESAEAFIKRMTVKDTYLL |
| | NEDVLPANSLLYQKYNVLNELNNVRVNGRRLSVGIKQDIYTELFKKKKTVKASDVASLV |
| | MAKTRGVNKPSVEGLSDPKKENSNLATYLDLKSIVGDKVDDNRYQTDLENIIEWRSVFED |
| | GEIFADKLTEVEWLTDEQRSALVKKRYKGWGRLSKKLLTGIVDENGQRIIDLMWNTDQN |
| | FKEIVDQPVFKEQIDQLNQKAITNDGMTLRERVESVLDDAYTSPQNKKAIWQVVRVVEDI |
| | VKAVGNAPKSISIEFARNEGNKGEITRSRRTQLQKLFEDQAHELVKDTSLTEELEKAPDLS |
| | DRYYFYFTQGGKDMYTGDPINFDEISTKYDIDHILPQSFVKDNSLDNRVLTSRKENNKKS |
| | DQVPAKLYAAKMKPYWNQLLKQGLITQRKFENLTKDVDQNIKYRSLGFVKRQLVETRQ |
| | VIKLTANILGSMYQEAGTEIIETRAGLTKQLREEFDLPKVREVNDYHHAVDAYLTTFAGQ |
| | YLNRRYPKLRSFFVYGEYMKFKHGSDLKLRNFNFFHELMEGDKSQGKVVDQQTGELITT |
| | RDEVAKSFDRLLNMKYMLVSKEVHDRSDQLYGATIVTAKESGKLTSPIEIKKNRLVDLYG |
| | AYTNGTSAFMTIIKFTGNKPKYKVIGIPTTSAASLKRAGKPGSESYNQELHRIIKSNPKVKK |
| | GFEIVVPHVSYGQLIVDGDCKFTLASPTVQHPATQLVLSKKSLETISSGYKILKDKPAIANE |
| | RLIRVFDEVVGQMNRYFTIFDQRSNRQKVADARDKFLSLPTESKYEGAKKVQVGKTEVIT |
| | NLLMGLHANATQGDLKVLGLATFGFFQSTTGLSLSEDTMIVYQSPTGLFERRICLKDI |
| | (SEQ ID NO: 9) |
| SaCas9 | MDKKYSIGLDIGTNSVGWAVITDEYKVPSKKFKVLGNTDRHSIKKNLIGALLFDSGETAE |
| Staphylococcus | ATRLKRTARRRYTRRKNRICYLQEIFSNEMAKVDDSFFHRLEESFLVEEDKKHERHPIFGN |
| aureus wild type | IVDEVAYHEKYPTIYHLRKKLVDSTDKADLRLIYLALAHMIKFRGHFLIEGDLNPDNSDVD |
| GenBank: | KLFIQLVQTYNQLFEENPINASGVDAKAILSARLSKSRRLENLIAQLPGEKKNGLFGNLIAL |
| AYD60528.1 | SLGLTPNFKSNFDLAEDAKLQLSKDTYDDDLDNLLAQIGDQYADLFLAAKNLSDAILLSDI |
| | LRVNTEITKAPLSASMIKRYDEHHQDLTLLKALVRQQLPEKYKEIFFDQSKNGYAGYIDG |
| | GASQEEFYKFIKPILEKMDGTEELLVKLNREDLLRKQRTFDNGSIPHQIHLGELHAILRRQE |
| | DFYPFLKDNREKIEKILTFRIPYYVGPLARGNSRFAWMTRKSEETITPWNFEEVVDKGASA |
| | QSFIERMTNFDKNLPNEKVLPKHSLLYEYFTVYNELTKVKYVTEGMRKPAFLSGEQKKAI |
| | VDLLFKTNRKVTVKQLKEDYFKKIECFDSVEISGVEDRENASLGTYHDLLKIIKDKDELDN |
| | EENEDILEDIVLTLTLFEDREMIEERLKTYAHLEDDKVMKQLKRRRYTGWGRLSRKLINGI |
| | RDKQSGKTILDFLKSDGFANRNFMQLIHDDSLTFKEDIQKAQVSGQGDSLHEHIANLAGSP |
| | AIKKGILQTVKVVDELVKVMGRHKPENIVIEMARENQTTQKGQKNSRERMKRIEEGIKEL |
| | GSQILKEHPVENTQLQNEKLYLYYLQNGRDMYVDQELDINRLSDYDVDHIVPQSFLKDDS |
| | IDNKVLTRSDKNRGKSDNVPSEEVVKKMKNYWRQLLNAKLITQRKFDNLTKAERGGLSE |
| | LDKAGFIKRQLVETRQITKHVAQILDSRMNTKYDENDKLIREVKVITLKSKLVSDFRKDFQ |
| | FYKVREINNYHHAHDAYLNAVVGTALIKKYPKLESEFVYGDYKVYDVRKMIAKSEQEIG |
| | KATAKYFFYSNIMNFFKTEITLANGEIRKRPLIETNGETGEIVWDKGRDFATVRKVLSMPQ |
| | VNIVKKTEVQTGGFSKESILPKRNSDKLIARKKDWDPKKYGGFDSPTVAYSVLVVAKVEK |
| | GKSKKLKSVKELLGITIMERSSFEKNPIDFLEAKGYKEVKKDLIIKLPKYSLFELENGRKRM |
| | LASAGELQKGNELALPSKYVNFLYLASHYEKLKGSPEDNEQKQLFVEQHKHYLDEIIEQIS |
| | EFSKRVILADANLDKVLSAYNKHRDKPIREQAENIIHLFTLTNLGAPAAFKYFDTTIDRKR |
| | YTSTKEVLDATLIHQSITGLYETRIDLSQLGGD (SEQ ID NO: 2) |
| SaCas9 | MGKRNYILGLDIGITSVGYGIIDYETRDVIDAGVRLFKEANVENNEGRRSKRGARRLKRR |
| Staphylococcus | RRHRIQRVKKLLFDYNLLTDHSELSGINPYEARVKGLSQKLSEEEFSAALLHLAKRRGVH |
| aureus | NVNEVEEDTGNELSTKEQISRNSKALEEKYVAELQLERLKKDGEVRGSINRFKTSDYVKE |
| | AKQLLKVQKAYHQLDQSFIDTYIDLLETRRTYYEGPGEGSPFGWKDIKEWYEMLMGHCT |
| | YFPEELRSVKYAYNADLYNALNDLNNLVITRDENEKLEYYEKFQIIENVFKQKKKPTLKQI |
| | AKEILVNEEDIKGYRVTSTGKPEFTNLKVYHDIKDITARKEHIENAELLDQIAKILTIYQSSE |
| | DIQEELTNLNSELTQEEIEQISNLKGYTGTHNLSLKAINLILDELWHTNDNQIAIFNRLKLVP |
| | KKVDLSQQKEIPTTLVDDFILSPVVKRSFIQSIKVINAIIKKYGLPNDIIIELAREKNSKDAQK |
| | MINEMQKRNRQTNERIEEIIRTTGKENAKYLIEKIKLHDMQEGKCLYSLEAIPLEDLLNNPF |
| | NYEVDHIIPRSVSFDNSFNNKVLVKQEENSKKGNRTPFQYLSSSDSKISYETFKKHILNLAK |
| | GKGRISKTKKEYLLEERDINRFSVQKDFINRNLVDTRYATRGLMNLLRSYFRVNNLDVKV |
| | KSINGGFTSFLRRKWKFKKERNKGYKHHAEDALIIANADFIFKEWKKLDKAKKVMENQM |
| | FEEKQAESMPEIETEQEYKEIFITPHQIKHIKDFKDYKYSHRVDKKPNRKLINDTLYSTRKD |
| | DKGNTLIVNNLNGLYDKDNDKLKKLINKSPEKLLMYHHDPQTYQKLKLIMEQYGDEKNP |
| | LYKYYEETGNYLTKYSKKDNGPVIKKIKYYGNKLNAHLDITDDYPNSRNKVVKLSLKPY |
| | RFDVYLDNGVYKFVTVKNLDVIKKENYYEVNSKCYEEAKKLKKISNQAEFIASFYKNDLI |
| | KINGEL YRVIGVNNDLLNRIEVNMIDITYREYLENMNDKRPPHIIKTIASKTQSIKKYSTDIL |
| | GNLYEVKSKKHPQIIKK |
| | (SEQ ID NO: 10) |
| StCas9 | MLFNKCIIISINLDFSNKEKCMTKPYSIGLDIGTNSVGWAVITDNYKVPSKKMKVLGNTSK |
| Streptococcus | KYIKKNLLGVLLFDSGITAEGRRLKRTARRRYTRRRNRILYLQEIFSTEMATLDDAFFQRL |
| thermophilus | DDSFLVPDDKRDSKYPIFGNLVEEKVYHDEFPTIYHLRKYLADSTKKADLRLVYLALAHM |
| UniProtKB/ | IKYRGHFLIEGEFNSKNNDIQKNFQDFLDTYNAIFESDLSLENSKQLEEIVKDKISKLEKKD |
| Swiss-Prot: | RILKLFPGEKNSGIFSEFLKLIVGNQADFRKCFNLDEKASLHFSKESYDEDLETLLGYIGDD |
| G3ECR1.2 | YSDVFLKAKKLYDAILLSGFLTVTDNETEAPLSSAMIKRYNEHKEDLALLKEYIRNISLKT |
| Wild type | YNEVFKDDTKNGYAGYIDGKTNQEDFYVYLKNLLAEFEGADYFLEKIDREDFLRKQRTF |
| | DNGSIPYQIHLQEMRAILDKQAKFYPFLAKNKERIEKILTFRIPYYVGPLARGNSDFAWSIR |
| | KRNEKITPWNFEDVIDKESSAEAFINRMTSEDLYLPEEKVLPKHSLLYETFNVYNELTKVR |
| | FIAESMRDYQFLDSKQKKDIVRLYFKDKRKVTDKDIIEYLHAIYGYDGIELKGIEKQFNSSL |
| | STYHDLLNIINDKEFLDDSSNEAIIEEIIHTLTIFEDREMIKQRLSKFENIFDKSVLKKLSRRH |
| | YTGWGKLSAKLINGIRDEKSGNTILDYLIDDGISNRNFMQLIHDDALSFKKKIQKAQIIGDE |
| | DKGNIKEVVKSLPGSPAIKKGILQSIKIVDELVKVMGGRKPESIVVEMARENQYTNQGKSN |
| | SQQRLKRLEKSLKELGSKILKENIPAKLSKIDNNALQNDRLYLYYLQNGKDMYTGDDLDI |
| | DRLSNYDIDHIIPQAFLKDNSIDNKVLVSSASNRGKSDDFPSLEVVKKRKTFWYQLLKSKL |
| | ISQRKEDNLTKAERGGLLPEDKAGFIQRQLVETRQITKHVARLLDEKENNKKDENNRAVR |
| | TVKIITLKSTLVSQFRKDFELYKVREINDFHHAHDAYLNAVIASALLKKYPKLEPEFVYGD |
| | YPKYNSFRERKSATEKVYFYSNIMNIFKKSISLADGRVIERPLIEVNEETGESVWNKESDLA |
| | TVRRVLSYPQVNVVKKVEEQNHGLDRGKPKGLFNANLSSKPKPNSNENLVGAKEYLDPK |
| | KYGGYAGISNSFAVLVKGTIEKGAKKKITNVLEFQGISILDRINYRKDKLNFLLEKGYKDIE |
| | LIIELPKYSLFELSDGSRRMLASILSTNNKRGEIHKGNQIFLSQKFVKLLYHAKRISNTINEN |
| | HRKYVENHKKEFEELFYYILEFNENYVGAKKNGKLLNSAFQSWQNHSIDELCSSFIGPTGS |
| | ERKGLFELTSRGSAADFEFLGVKIPRYRDYTPSSLLKDATLIHQSVTGLYETRIDLAKLGEG |
| | (SEQ ID NO: 11) |
| LcCas9 | MKIKNYNLALTPSTSAVGHVEVDDDLNILEPVHHQKAIGVAKFGEGETAEARRLARSARR |
| Lactobacillus | TTKRRANRINHYFNEIMKPEIDKVDPLMEDRIKQAGLSPLDERKEFRTVIFDRPNIASYYHN |
| crispatus | QFPTIWHLQKYLMITDEKADIRLIYWALHSLLKHRGHFENTTPMSQFKPGKLNLKDDMLA |
| NCBI Reference | LDDYNDLEGLSFAVANSPEIEKVIKDRSMHKKEKIAELKKLIVNDVPDKDLAKRNNKIITQ |
| Sequence: | IVNAIMGNSFHLNFIFDMDLDKLTSKAWSFKLDDPELDTKFDAISGSMTDNQIGIFETLQKI |
| WP_1334780441 | YSAISLLDILNGSSNVVDAKNALYDKHKRDLNLYFKFLNTLPDEIAKTLKAGYTLYIGNRK |
| Wild type | KDLLAARKLLKVNVAKNFSQDDFYKLINKELKSIDKQGLQTRESEKVGELVAQNNFLPV |
| | QRSSDNVFIPYQLNAITFNKILENQGKYYDFLVKPNPAKKDRKNAPYELSQLMQFTIPYYV |
| | GPLVTPEEQVKSGIPKTSRFAWMVRKDNGAITPWNFYDKVDIEATADKFIKRSIAKDSYLL |
| | SELVLPKHSLLYEKYEVENELSNVSLDGKKLSGGVKQILFNEVFKKTNKVNTSRILKALA |
| | KHNIPGSKITGLSNPEEFTSSLQTYNAWKKYFPNQIDNFAYQQDLEKMIEWSTVFEDHKIL |
| | AKKLDEIEWLDDDQKKFVANTRLRGWGRLSKRLLTGLKDNYGKSIMQRLETTKANFQQI |
| | VYKPEFREQIDKISQAAAKNQSLEDILANSYTSPSNRKAIRKTMSVVDEYIKLNHGKEPDK |
| | IFLMFQRSEQEKGKQTEARSKQLNRILSQLKADKSANKLFSKQLADEFSNAIKKSKYKLN |
| | DKQYFYFQQLGRDALTGEVIDYDELYKYTVLHIIPRSKLTDDSQNNKVLTKYKIVDGSVA |
| | LKFGNSYSDALGMPIKAFWTELNRLKLIPKGKLLNLTTDFSTLNKYQRDGYIARQLVETQ |
| | QIVKLLATIMQSRFKHTKIIEVRNSQVANIRYQFDYFRIKNLNEYYRGFDAYLAAVVGTYL |
| | YKVYPKARRLFVYGQYLKPKKTNQENQDMHLDSEKKSQGFNFLWNLLYGKQDQIFVNG |
| | TDVIAFNRKDLITKMNTVYNYKSQKISLAIDYHNGAMFKATLFPRNDRDTAKTRKLIPKK |
| | KDYDTDIYGGYTSNVDGYMLLAEIIKRDGNKQYGFYGVPSRLVSELDTLKKTRYTEYEEK |
| | LKEIIKPELGVDLKKIKKIKILKNKVPFNQVIIDKGSKFFITSTSYRWNYRQLILSAESQQTL |
| | MDLVVDPDFSNHKARKDARKNADERLIKVYEEILYQVKNYMPMFVELHRCYEKLVDAQ |
| | KTFKSLKISDKAMVLNQILILLHSNATSPVLEKLGYHTRFTLGKKHNLISENAVLVTQSITG |
| | LKENHVSIKQML (SEQ ID NO: 12) |
| PdCas9 | MTNEKYSIGLDIGTSSIGFAVVNDNNRVIRVKGKNAIGVRLFDEGKAAADRRSFRTTRRSF |
| Pedicoccus | RTTRRRLSRRRWRLKLLREIFDAYITPVDEAFFIRLKESNLSPKDSKKQYSGDILENDRSDK |
| damnosus | DFYEKYPTIYHLRNALMTEHRKFDVREIYLAIHHIMKERGHELNATPANNEKVGRLNLEE |
| NCBI Reference | \|KFEELNDIYQRVFPDESIEFRTDNLEQIKEVLLDNKRSRADRQRTLVSDIYQSSEDKDIEKR |
| Sequence: | NKAVATEILKASLGNKAKLNVITNVEVDKEAAKEWSITEDSESIDDDLAKIEGQMTDDGH |
| WP_0629132731 | EIIEVLRSLYSGITLSAIVPENHTLSQSMVAKYDLHKDHLKLFKKLINGMTDTKKAKNLRA |
| Wild type | AYDGYIDGVKGKVLPQEDFYKQVQVNLDDSAEANEIQTYIDQDIFMPKQRTKANGSIPHQ |
| | LQQQELDQUIENQKAYYPWLAELNPNPDKKRQQLAKYKLDELVTFRVPYYVGPMITAKD |
| | QKNQSGAEFAWMIRKEPGNITPWNFDQKVDRMATANQFIKRMTTTDTYLLGEDVLPAQS |
| | LLYQKFEVLNELNKIRIDHKPISIEQKQQIFNDLFKQFKNVTIKHLQDYLVSQGQYSKRPLI |
| | EGLADEKRFNSSLSTYSDLCGIFGAKLVEENDRQEDLEKIIEWSTIFEDKKIYRAKLNDLT |
| | WLTDDQKEKLATKRYQGWGRLSRKLLVGLKNSEHRNIMDILWITNENFMQIQAEPDFAK |
| | LVTDANKGMLEKTDSQDVINDLYTSPQNKKAIRQILLVVHDIQNAMHGQAPAKIHVEFAR |
| | GEERNPRRSVQRQRQVEAAYEKVSNELVSAKVRQEFKEAINNKRDFKDRLFLYFMQGGI |
| | DIYTGKQLNIDQLSSYQIDHILPQAFVKDDSLTNRVLTNENQVKADSVPIDIFGKKMLSVW |
| | GRMKDQGLISKGKYRNLTMNPENISAHTENGFINRQLVETRQVIKLAVNILADEYGDSTQI |
| | ISVKADLSHQMREDFELLKNRDVNDYHHAFDAYLAAFIGNYLLKRYPKLESYFVYGDFK |
| | KFTQKETKMRRFNFIYDLKHCDQVVNKETGEILWTKDEDIKYIRHLFAYKKILVSHEVRE |
| | KRGALYNQTIYKAKDDKGSGQESKKLIRIKDDKETKIYGGYSGKSLAYMTIVQITKKNKV |
| | SYRVIGIPTLALARLNKLENDSTENNGELYKIIKPQFTHYKVDKKNGEIIETTDDFKIVVSK |
| | VRFQQLIDDAGQFFMLASDTYKNNAQQLVISNNALKAINNTNITDCPRDDLERLDNLRLD |
| | SAFDEIVKKMDKYFSAYDANNFREKIRNSNLIFYQLPVEDQWENNKITELGKRTVLTRILQ |
| | GLHANATTTDMSIFKIKTPFGQLRQRSGISLSENAQLIYQSPTGLFERRVQLNKIK (SEQ ID |
| | NO: 13) |
| FnCas9 | MKKQKFSDYYLGFDIGTNSVGWCVTDLDYNVLRFNKKDMWGSRLFEEAKTAAERRVQ |
| Fusobaterium | RNSRRRLKRRKWRLNLLEEIFSNEILKIDSNFFRRLKESSLWLEDKSSKEKFTLENDDNYK. |
| nucleatum | DYDFYKQYPTIFHLRNELIKNPEKKDIRLVYLAIHSIFKSRGHFLFEGQNLKEIKNFETLYN |
| NCBI Reference | NLIAFLEDNGINKIIDKNNIEKLEKIVCDSKKGLKDKEKEFKEIFNSDKQLVAIFKLSVGSSV |
| Sequence: | SLNDLFDTDEYKKGEVEKEKISFREQIYEDDKPIYYSILGEKIELLDIAKTFYDFMVLNNILA |
| WP_0607989841 | DSQYISEAKVKLYEEHKKDLKNLKYIIRKYNKGNYDKLFKDKNENNYSAYIGLNKEKSK |
| | KEVIEKSRLKIDDLIKNIKGYLPKVEEIEEKDKAIFNKILNKIELKTILPKQRISDNGTLPYQI |
| | HEAELEKILENQSKYYDELNYEENGIITKDKLLMTFKFRIPYYVGPLNSYHKDKGGNSWIV |
| | RKEEGKILPWNFEQKVDIEKSAEEFIKRMTNKCTYLNGEDVIPKDTFLYSEYVILNELNKV |
| | QVNDEFLNEENKRKIIDELFKENKKVSEKKFKEYLLVKQIVDGTIELKGVKDSENSNYISYI |
| | RFKDIFGEKLNLDIYKEISEKSILWKCLYGDDKKIFEKKIKNEYGDILTKDEIKKINTFKENN |
| | WGRLSEKLLTGIEFINLETGECYSSVMDALRRTNYNLMELLSSKFTLQESINNENKEMNEA |
| | SYRDLIEESYVSPSLKRAIFQTLKIYEEIRKITGRVPKKVFIEMARGGDESMKNKKIPARQE |
| | QLKKLYDSCGNDIANFSIDIKEMKNSLISYDNNSLRQKKLYLYYLQFGKCMYTGREIDLD |
| | RLLQNNDTYDIDHIYPRSKVIKDDSFDNLVLVLKNENAEKSNEYPVKKEIQEKMKSFWRF |
| | LKEKNFISDEKYKRLTGKDDFELRGFMARQLVNVRQTTKEVGKILQQIEPEIKIVYSKAEI |
| | ASSFREMFDFIKVRELNDTHHAKDAYLNIVAGNVYNTKFTEKPYRYLQEIKENYDVKKIY |
| | NYDIKNAWDKENSLEIVKKNMEKNTVNITRFIKEKKGQLFDLNPIKKGETSNEIISIKPKVY |
| | NGKDDKLNEKYGYYKSLNPAYFLYVEHKEKNKRIKSFERVNLVDVNNIKDEKSLVKYLI |
| | ENKKLVEPRVIKKVYKRQVILINDYPYSIVTLDSNKLMDFENLKPLFLENKYEKILKNVIKF |
| | LEDNQGKSEENYKFIYLKKKDRYEKNETLESVKDRYNLEFNEMYDKFLEKLDSKDYKNY |
| | MNNKKYQELLDVKEKFIKLNLFDKAFTLKSFLDLFNRKTMADESKVGLTKYLGKIQKISS |
| | NVLSKNELYLLEESVTGLFVKKIKL (SEQ ID NO: 14) |
| EcCas9 | RRKQRIQILQELLGEEVLKTDPGFFHRMKESRYVVEDKRTLDGKQVELPYALFVDKDYTD |
| Enterococcus | KEYYKQFPTINHLIVYLMTTSDTPDIRLVYLALHYYMKNRGNFLHSGDINNVKDINDILEQ |
| cecorum | LDNVLETFLDGWNLKLKSYVEDIKNIYNRDLGRGERKKAFVNTLGAKTKAEKAFCSLISG |
| NCBI Reference | GSTNLAELFDDSSLKEIETPKIEFASSSLEDKIDGIQEALEDRFAVIEAAKRLYDWKTLTDIL |
| Sequence: | GDSSSLAEARVNSYQMHHEQLLELKSLVKEYLDRKVFQEVFVSLNVANNYPAYIGHTKI |
| WP_0473385011 | NGKKKELEVKRTKRNDFYSYVKKQVIEPIKKKVSDEAVLTKLSEIESLIEVDKYLPLQVNS |
| Wild type | DNGVIPYQVKLNELTRIFDNLENRIPVLRENRDKIIKTFKFRIPYYVGSLNGVVKNGKCTN |
| | WMVRKEEGKIYPWNFEDKVDLEASAEQFIRRMTNKCTYLVNEDVLPKYSLLYSKYLVLS |
| | ELNNLRIDGRPLDVKIKQDIYENVFKKNRKVTLKKIKKYLLKEGIITDDDELSGLADDVKS |
| | SLTAYRDFKEKLGHLDLSEAQMENIILNITLFGDDKKLLKKRLAALYPFIDDKSLNRIATLN |
| | YRDWGRLSERFLSGITSVDQETGELRTIIQCMYETQANLMQLLAEPYHFVEAIEKENPKVD |
| | LESISYRIVNDLYVSPAVKRQIWQTLLVIKDIKQVMKHDPERIFIEMAREKQESKKTKSRK |
| | QVLSEVYKKAKEYEHLFEKLNSLTEEQLRSKKIYLYFTQLGKCMYSGEPIDFENLVSANS |
| | NYDIDHIYPQSKTIDDSENNIVLVKKSLNAYKSNHYPIDKNIRDNEKVKTLWNTLVSKGLI |
| | TKEKYERLIRSTPFSDEELAGFIARQLVETRQSTKAVAEILSNWFPESEIVYSKAKNVSNFR |
| | QDFEILKVRELNDCHHAHDAYLNIVVGNAYHTKFTNSPYRFIKNKANQEYNLRKLLQKV |
| | NKIESNGVVAWVGQSENNPGTIATVKKVIRRNTVLISRMVKEVDGQLFDLTLMKKGKGQ |
| | VPIKSSDERLTDISKYGGYNKATGAYFTFVKSKKRGKVVRSFEYVPLHLSKQFENNNELL |
| | KEYIEKDRGLTDVEILIPKVLINSLFRYNGSLVRITGRGDTRLLLVHEQPLYVSNSFVQQLK |
| | SVSSYKLKKSENDNAKLTKTATEKLSNIDELYDGLLRKLDLPIYSYWFSSIKEYLVESRTK |
| | YIKLSIEEKAL VIFEILHLFQSDAQVPNLKILGLSTKPSRIRIQKNLKDTDKMSIIHQSPSGIFE |
| | HEIELTSL (SEQ ID NO: 15) |
| AhCas9 | MQNGELGITVSSEQVGWAVTNPKYELERASRKDLWGVRLFDKAETAEDRRMFRTNRRL |
| Anaerostipes | NQRKKNRIHYLRDIFHEEVNQKDPNFFQQLDESNFCEDDRTVEFNEDTNLYKNQFPTVYH |
| hadrus | LRKYLMETKDKPDIRLVYLAFSKFMKNRGHFLYKGNLGEVMDFENSMKGFCESLEKENI |
| NCBI Reference | DFPTLSDEQVKEVRDILCDHKIAKTVKKKNIITITKVKSKTAKAWIGLFCGCSVPVKVLFQ |
| Sequence: | DIDEEIVTDPEKISFEDASYDDYIANIEKGVGIYYEAIVSAKMLFDWSILNEILGDHQLLSDA |
| WP_0449242781 | MIAEYNKHHDDLKRLQKIIKGTGSRELYQDIFINDVSGNYVCYVGHAKTMSSADQKQFY |
| Wild type | TFLKNRLKNVNGISSEDAEWIDTEIKNGTLLPKQTKRDNSVIPHQLQLREFELILDNMQEM |
| | YPFLKENREKLLKIFNFVIPYYVGPLKGVVRKGESTNWMVPKKDGVIHPWNFDEMVDKE |
| | ASAECFISRMTGNCSYLFNEKVLPKNSLLYETFEVLNELNPLKINGEPISVELKQRIYEQLF |
| | LTGKKVTKKSLTKYLIKNGYDKDIELSGIDNEFHSNLKSHIDFEDYDNLSDEEVEQIILRITV |
| | FEDKQLLKDYLNREFVKLSEDERKQICSLSYKGWGNLSEMLLNGITVTDSNGVEVSVMD |
| | MLWNTNLNLMQILSKKYGYKAEIEHYNKEHEKTIYNREDLMDYLNIPPAQRRKVNQLITI |
| | VKSLKKTYGVPNKIFFKISREHQDDPKRTSSRKEQLKYLYKSLKSEDEKHLMKELDELND |
| | HELSNDKVYLYFLQKGRCIYSGKKLNLSRLRKSNYQNDIDYIYPLSAVNDRSMNNKVLTG |
| | IQENRADKYTYFPVDSEIQKKMKGFWMELVLQGFMTKEKYFRLSRENDFSKSELVSFIER |
| | EISDNQQSGRMIASVLQYYFPESKIVFVKEKLISSFKRDFHLISSYGHNHLQAAKDAYITIV |
| | VGNVYHTKFTMDPAIYFKNHKRKDYDLNRLFLENISRDGQIAWESGPYGSIQTVRKEYAQ |
| | NHIAVTKRVVEVKGGLFKQMPLKKGHGEYPLKTNDPRFGNIAQYGGYTNVTGSYFVLVE |
| | SMEKGKKRISLEYVPVYLHERLEDDPGHKLLKEYLVDHRKLNHPKILLAKVRKNSLLKID |
| | GFYYRLNGRSGNALILTNAVELIMDDWQTKTANKISGYMKRRAIDKKARVYQNEFHIQE |
| | LEQLYDFYLDKLKNGVYKNRKNNQAELIHNEKEQFMELKTEDQCVLLTEIKKLFVCSPM |
| | QADLTLIGGSKHTGMIAMSSNVTKADFAVIAEDPLGLRNKVIYSHKGEK (SEQ ID NO: 16) |
| KyCas9 | MSQNNNKIYNIGLDIGDASVGWAVVDEHYNLLKRHGKHMWGSRLFTQANTAVERRSSR |
| Kandleria | STRRRYNKRRERIRLLREIMEDMVLDVDPTFFIRLANVSFLDQEDKKDYLKENYHSNYNL |
| vitulina | FIDKDENDKTYYDKYPTIYHLRKHLCESKEKEDPRLIYLALHHIVKYRGNFLYEGQKESM |
| NCBI Reference | DVSNIEDKMIDVLRQFNEINLFEYVEDRKKIDEVLNVLKEPLSKKHKAEKAFALFDTTKD |
| Sequence: | NKAAYKELCAALAGNKENVTKMLKEAELHDEDEKDISFKFSDATFDDAFVEKQPLLGDC |
| WP_0315899691 | VEFIDLLHDIYSWVELQNILGSAHTSEPSISAAMIQRYEDHKNDLKLLKDVIRKYLPKKYF |
| Wild type | EVFRDEKSKKNNYCNYINHPSKTPVDEFYKYIKKLIEKIDDPDVKTILNKIELESFMLKQNS |
| | RTNGAVPYQMQLDELNKILENQSVYYSDLKDNEDKIRSILTFRIPYYFGPLNITKDRQFDW |
| | IIKKEGKENERILPWNANEIVDVDKTADEFIKRMRNFCTYFPDEPVMAKNSLTVSKYEVL |
| | NEINKLRINDHLIKRDMKDKMLHTLFMDHKSISANAMKKWLVKNQYFSNTDDIKIEGFQ |
| | KENACSTSLTPWIDFTKIFGKINESNYDFIEKIIYDVTVFEDKKILRRRLKKEYDLDEEKIKK |
| | ILKLKYSGWSRLSKKLLSGIKTKYKDSTRTPETVLEVMERTNMNLMQVINDEKLGFKKTI |
| | DDANSTSVSGKFSYAEVQELAGSPAIKRGIWQALLIVDEIKKIMKHEPAHVYIEFARNEDE |
| | KERKDSFVNQMLKLYKDYDFEDETEKEANKHLKGEDAKSKIRSERLKLYYTQMGKCMY |
| | TGKSLDIDRLDTYQVDHIVPQSLLKDDSIDNKVLVLSSENQRKLDDLVIPSSIRNKMYGFW |
| | EKLENNKIISPKKFYSLIKTEFNEKDQERFINRQIVETRQITKHVAQIIDNHYENTKVVTVRA |
| | DLSHQFRERYHIYKNRDINDFHHAHDAYIATILGTYIGHRFESLDAKYIYGEYKRIFRNQK |
| | NKGKEMKKNNDGFILNSMRNIYADKDTGEIVWDPNYIDRIKKCFYYKDCFVTKKLEENN |
| | GTFFNVTVLPNDTNSDKDNTLATVPVNKYRSNVNKYGGFSGVNSFIVAIKGKKKKGKKV |
| | IEVNKLTGIPLMYKNADEEIKINYLKQAEDLEEVQIGKEILKNQLIEKDGGLYYIVAPTEIIN |
| | AKQLILNESQTKLVCEIYKAMKYKNYDNLDSEKIIDLYRLLINKMELYYPEYRKQL VKKF |
| | EDRYEQLKVISIEEKCNIIKQILATLHCNSSIGKIMYSDFKISTTIGRLNGRTISLDDISFIAESP |
| | TGMYSKKYKL (SEQ ID NO: 17) |
| EfCas9 | MRLFEEGHTAEDRRLKRTARRRISRRRNRLRYLQAFFEEAMTDLDENFFARLQESFLVPE |
| Enterococcus | DKKWHRHPIFAKLEDEVAYHETYPTIYHLRKKLADSSEQADLRLIYLALAHIVKYRGHFLI |
| faecalis | EGKLSTENTSVKDQFQQFMVIYNQTFVNGESRLVSAPLPESVLIEEELTEKASRTKKSEKV |
| NCBI Reference | LQQFPQEKANGLFGQFLKLMVGNKADFKKVFGLEEEAKITYASESYEEDLEGILAKVGDE |
| Sequence: | YSDVFLAAKNVYDAVELSTILADSDKKSHAKLSSSMIVRFTEHQEDLKKFKRFIRENCPDE |
| WP_016631044.1 | YDNLFKNEQKDGYAGYIAHAGKVSQLKFYQYVKKIIQDIAGAEYFLEKIAQENFLRKQRT |
| Wild type | FDNGVIPHQIHLAELQAIIHRQAAYYPFLKENQEKIEQLVTFRIPYYVGPLSKGDASTFAWL |
| | KRQSEEPIRPWNLQETVDLDQSATAFIERMTNFDTYLPSEKVLPKHSLLYEKFMVFNELTK |
| | ISYTDDRGIKANFSGKEKEKIFDYLFKTRRKVKKKDIIQFYRNEYNTEIVTLSGLEEDQFNA |
| | SFSTYQDLLKCGLTRAELDHPDNAEKLEDIIKILTIFEDRQRIRTQLSTFKGQFSAEVLKKLE |
| | RKHYTGWGRLSKKLINGIYDKESGKTILDYLVKDDGVSKHYNRNFMQLINDSQLSFKNAI |
| | QKAQSSEHEETLSETVNELAGSPAIKKGIYQSLKIVDELVAIMGYAPKRIVVEMARENQTT |
| | STGKRRSIQRLKIVEKAMAEIGSNLLKEQPTTNEQLRDTRLFLYYMQNGKDMYTGDELSL |
| | HRLSHYDIDHIIPQSFMKDDSLDNLVLVGSTENRGKSDDVPSKEVVKDMKAYWEKLYAA |
| | GLISQRKFQRLTKGEQGGLTLEDKAHFIQRQLVETRQITKNVAGILDQRYNAKSKEKKVQI |
| | ITLKASLTSQFRSIFGLYKVREVNDYHHGQDAYLNCVVATTLLKVYPNLAPEFVYGEYPK |
| | FQTFKENKATAKAIIYTNLLRFFTEDEPRFTKDGEILWSNSYLKTIKKELNYHQMNIVKKV |
| | EVQKGGFSKESIKPKGPSNKLIPVKNGLDPQKYGGFDSPVVAYTVLFTHEKGKKPLIKQEI |
| | LGITIMEKTRFEQNPILFLEEKGFLRPRVLMKLPKYTLYEFPEGRRRLLASAKEAQKGNQM |
| | VLPEHLLTLLYHAKQCLLPNQSESLAYVEQHQPEFQEILERVVDFAEVHTLAKSKVQQIV |
| | KLFEANQTADVKEIAASFIQLMQFNAMGAPSTFKFFQKDIERARYTSIKEIFDATIIYQSPTG |
| | LYETRRKVVD (SEQ ID NO: 18) |
| Staphylococcus | KRNYILGLDIGITSVGYGIIDYETRDVIDAGVRLFKEANVENNEGRRSKRGARRLKRRRRH |
| aureus Cas9 | RIQRVKKLLFDYNLLTDHSELSGINPYEARVKGLSQKLSEEEFSAALLHLAKRRGVHNVN |
| | EVEEDTGNELSTKEQISRNSKALEEKYVAELQLERLKKDGEVRGSINRFKTSDYVKEAKQ |
| | LLKVQKAYHQLDQSFIDTYIDLLETRRTYYEGPGEGSPFGWKDIKEWYEMLMGHCTYFP |
| | EELRSVKYAYNADLYNALNDLNNLVITRDENEKLEYYEKFQIIENVFKQKKKPTLKQIAK |
| | EILVNEEDIKGYRVTSTGKPEFTNLKVYHDIKDITARKEIENAELLDQIAKILTIYQSSEDIQ |
| | EELTNLNSELTQEEIEQISNLKGYTGTHNLSLKAINLILDELWHTNDNQIAIFNRLKLVPKK |
| | VDLSQQKEIPTTLVDDFILSPVVKRSFIQSIKVINAIIKKYGLPNDIIIELAREKNSKDAQKMI |
| | NEMQKRNRQTNERIEEIIRTTGKENAKYLIEKIKLHDMQEGKCLYSLEAIPLEDLLNNPEN |
| | YEVDHIIPRSVSFDNSFNNKVLVKQEENSKKGNRTPFQYLSSSDSKISYETFKKHILNLAKG |
| | KGRISKTKKEYLLEERDINRESVQKDFINRNLVDTRYATRGLMNLLRSYFRVNNLDVKVK |
| | SINGGFTSFLRRKWKFKKERNKGYKHHAEDALIIANADFIFKEWKKLDKAKKVMENQMF |
| | EEKQAESMPEIETEQEYKEIFITPHQIKHIKDFKDYKYSHRVDKKPNRELINDTLYSTRKDD |
| | KGNTLIVNNLNGLYDKDNDKLKKLINKSPEKLLMYHHDPQTYQKLKLIMEQYGDEKNPL |
| | YKYYEETGNYLTKYSKKDNGPVIKKIKYYGNKLNAHLDITDDYPNSRNKVVKLSLKPYR |
| | FDVYLDNGVYKFVTVKNLDVIKKENYYEVNSKCYEEAKKLKKISNQAEFIASFYNNDLIK |
| | INGELYRVIGVNNDLLNRIEVNMIDITYREYLENMNDKRPPRIIKTIASKTQSIKKYSTDILG |
| | NLYEVKSKKHPQIIKKG (SEQ ID NO: 19) |
| Geobacillus | MKYKIGLDIGITSIGWAVINLDIPRIEDLGVRIFDRAENPKTGESLALPRRLARSARRRLRRR |
| thermodenitrificans | KHRLERIRRLFVREGILTKEELNKLFEKKHEIDVWQLRVEALDRKLNNDELARILLHLAKR |
| Cas9 | RGFRSNRKSERTNKENSTMLKHIEENQSILSSYRTVAEMVVKDPKFSLHKRNKEDNYTNT |
| | VARDDLEREIKLIFAKQREYGNIVCTEAFEHEYISIWASQRPFASKDDIEKKVGFCTFEPKE |
| | KRAPKATYTFQSFTVWEHINKLRLVSPGGIRALTDDERRLIYKQAFHKNKITFHDVRTLLN |
| | LPDDTRFKGLLYDRNTTLKENEKVRFLELGAYHKIRKAIDSVYGKGAAKSFRPIDEDTFG |
| | YALTMEKDDTDIRSYLRNEYEQNGKRMENLADKVYDEELIEELLNLSFSKFGHLSLKALR |
| | NILPYMEQGEVYSTACERAGYTFTGPKKKQKTVLLPNIPPIANPVVMRALTQARKVVNAII |
| | KKYGSPVSIHIELARELSQSFDERRKMQKEQEGNRKKNETAIRQLVEYGLTLNPTGLDIVK |
| | FKLWSEQNGKCAYSLQPIEIERLLEPGYTEVDHVIPYSRSLDDSYTNKVLVLTKENREKGN |
| | RTPAEYLGLGSERWQQFETFVLINKQFSKKKRDRLLRLHYDENEENEFKNRNLNDTRYIS |
| | RFLANFIREHLKFADSDDKQKVYTVNGRITAHLRSRWNENKNREESNLHHAVDAAIVAC |
| | TTPSDIARVTAFYQRREQNKELSKKTDPQFPQPWPHFADELQARLSKNPKESIKALNLGN |
| | YDNEKLESLQPVFVSRMPKRSITGAAHQETLRRYIGIDERSGKIQTVVKKKLSEIQLDKTG |
| | HFPMYGKESDPRTYEAIRQRLLEHNNDPKKAFQEPLYKPKKNGELGPIIRTIKIIDTTNQVIP |
| | LNDGKTVAYNSNIVRVDVFEKDGKYYCVPIYTIDMMKGILPNKAIEPNKPYSEWKEMTE |
| | DYTFRFSLYPNDLIRIEFPREKTIKTAVGEEIKIKDLFAYYQTIDSSNGGLSLVSHDNNFSLR |
| | SIGSRTLKRFEKYQVDVLGNIYKVRGEKRVGVASSSHSKAGETIRPL (SEQ ID NO: 20) |
| ScCas9 | MEKKYSIGLDIGTNSVGWAVITDDYKVPSKKFKVLGNTNRKSIKKNLMGALLFDSGETAE |
| S. canis | ATRLKRTARRRYTRRKNRIRYLQEIFANEMAKLDDSFFQRLEESFLVEEDKKNERHPIFGN |
| 1375 AA | LADEVAYHRNYPTIYHLRKKLADSPEKADLRLIYLALAHIIKFRQHFLIEGKLNAENSDVA |
| 159.2 kDa | KLFYQLIQTYNQLFEESPLDEIEVDAKGILSARLSKSKRLEKLIAVFPNEKKNGLEGNIIALA |
| | LGLTPNFKSNFDLTEDAKLQLSKDTYDDDLDELLGQIGDQYADLFSAAKNLSDAILLSDIL |
| | RSNSEVTKAPLSASMVKRYDEHHQDLALLKTLVRQQFPEKYAEIFKDDTKNGYAGYVGI |
| | GIKHRKRTTKLATQEEFYKFIKPILEKMDGAEELLAKLNRDDLLRKQRTFDNGSIPHQIHL |
| | KELHAILRRQEEFYPFLKENREKIEKILTFRIPYYVGPLARGNSRFAWLTRKSEEATTPWNF |
| | EEVVDKGASAQSFIERMTNFDEQLPNKKVLPKHSLLYEYFTVYNELTKVKYVTERMRKP |
| | EFLSGEQKKAIVDLLFKTNRKVTVKQLKEDYFKKIECFDSVEIIGVEDRENASLGTYHDLL |
| | KIIKDKDFLDNEENEDILEDIVLTLTLFEDREMIEERLKTYAHLEDDKVMKQLKRRHYTG |
| | WGRLSRKMINGIRDKQSGKTILDFLKSDGFSNRNFMQLIHDDSLTFKEEIEKAQVSGQGDS |
| | LHEQIADLAGSPAIKKGILQTVKIVDELVKVMGHKPENIVIEMARENQTTTKGLQQSRERK |
| | KRIEEGIKELESQILKENPVENTQLQNEKLYLYYLQNGRDMYVDQELDINRLSDYDVDHI |
| | VPQSFIKDDSIDNKVLTRSVENRGKSDNVPSEEVVKKMKNYWRQLLNAKLITQRKFDNLT |
| | KAERGGLSEADKAGFIKRQLVETRQITKHVARILDSRMNTKRDKNDKPIREVKVITLKSKL |
| | VSDFRKDFQLYKVRDINNYHHAHDAYLNAVVGTALIKKYPKLESEFVYGDYKVYDVRK |
| | MIAKSEQEIGKATAKRFFYSNIMNFFKTEVKLANGEIRKRPLIETNGETGEVVWNKEKDFA |
| | TVRKVLAMPQVNIVKKTEVQTGGFSKESILSKRESAKLIPRKKGWDTRKYGGFGSPTVAY |
| | SILVVAKVEKGKAKKLKSVKVLVGITIMEKGSYEKDPIGFLEAKGYKDIKKELIFKLPKYS |
| | LFELENGRRRMLASATELQKANELVLPQHLVRLLYYTQNISATTGSNNLGYIEQHREEFK |
| | EIFEKIIDFSEKYILKNKVNSNLKSSFDEQFAVSDSILLSNSFVSLLKYTSFGASGGFTFLDLD |
| | VKQGRLRYQTVTEVLDATLIYQSITGLYETRTDLSQLGGD (SEQ ID NO: 21) |

[0352] The prime editors utilized in the methods and compositions described herein may include any of the above Cas9 ortholog sequences, or any variants thereof having at least 80%, at least 85%, at least 90%, at least 95%, or at least 99% sequence identity thereto.

[0353] The napDNAbp may include any suitable homologs and/or orthologs or naturally occurring enzymes, such as, Cas9, Cas9 homologs and/or orthologs have been described in various species, including, but not limited to, S. pyogenes and S. thermophilus. Preferably, the Cas moiety is configured (e.g., mutagenized, recombinantly engineered, or otherwise obtained from nature) as a nickase, i.e., capable of cleaving only a single strand of the target double-stranded DNA. Additional suitable Cas9 nucleases and sequences will be apparent to those of skill in the art based on this disclosure, and such Cas9 nucleases and sequences include Cas9 sequences from the organisms and loci disclosed in Chylinski, Rhun. and Charpentier. “The tracrRNA and Cas9 families of type II CRISPR-Cas immunity systems” (2013) RNA Biology 10:5, 726-737; the entire contents of which are incorporated herein by reference. In some embodiments, a Cas9 nuclease has an inactive (e.g., an inactivated) DNA cleavage domain; that is, the Cas9 is a nickase. In some embodiments, the Cas9 protein comprises an amino acid sequence that is at least 80% identical to the amino acid sequence of a Cas9 protein as provided by any one of the variants of Table 3. In some embodiments, the Cas9 protein comprises an amino acid sequence that is at least 85%, at least 90%, at least 92%, at least 95%, at least 96%, at least 97%, at least 98%, at least 99%, or at least 99.5% identical to the amino acid sequence of a Cas9 protein as provided by any one of the Cas9 orthologs in the above tables.

### C. Dead Cas9 Variant

[0354] In certain embodiments, the prime editors utilized in the methods and compositions described herein may include a dead Cas9, e.g., dead SpCas9, which has no nuclease activity due to one or more mutations that inactive both nuclease domains of Cas9, namely the RuvC domain (which cleaves the non-protospacer DNA strand) and HNH domain (which cleaves the protospacer DNA strand). The nuclease inactivation may be due to one or mutations that result in one or more substitutions and/or deletions in the amino acid sequence of the encoded protein, or any variants thereof having at least 80%, at least 85%, at least 90%, at least 95%, or at least 99% sequence identity thereto.

[0355] As used herein, the term “dCas9” refers to a nuclease-inactive Cas9 or nuclease-dead Cas9, or a functional fragment thereof, and embraces any naturally occurring dCas9 from any organism, any naturally-occurring dCas9 equivalent or functional fragment thereof, any engineered dCas9 variant or functional fragment thereof, any dCas9 homolog, ortholog, or paralog from any organism, and any mutant or variant of a dCas9, naturally-occurring or engineered. The term dCas9 is not meant to be particularly limiting and may be referred to as a “dCas9 or equivalent.” Exemplary dCas9 proteins and method for making dCas9 proteins are further described herein and/or are described in the art and are incorporated herein by reference.

[0356] In other embodiments, dCas9 corresponds to, or comprises in part or in whole, a Cas9 amino acid sequence having one or more mutations that inactivate the Cas9 nuclease activity. In other embodiments, Cas9 variants having mutations other than D10A and H840A are provided which may result in the full or partial inactivation of the endogenous Cas9 nuclease activity (e.g., nCas9 or dCas9, respectively). Such mutations, by way of example, include other amino acid substitutions at D10 and H840, or other substitutions within the nuclease domains of Cas9 (e.g., substitutions in the HNH nuclease subdomain and/or the RuvC1 subdomain) with reference to a wild type sequence such as Cas9 from Streptococcus pyogenes (NCBI Reference Sequence: NC_017053.1). In some embodiments, variants or homologues of Cas9 (e.g., variants of Cas9 from Streptococcus pyogenes (NCBI Reference Sequence: NC_017053.1 (SEQ ID NO: 4))) are provided which are at least about 70% identical, at least about 80% identical, at least about 90% identical, at least about 95% identical, at least about 98% identical, at least about 99% identical, at least about 99.5% identical, or at least about 99.9% identical to NCBI Reference Sequence: NC_017053.1. In some embodiments, variants of dCas9 (e.g., variants of NCBI Reference Sequence: NC_017053.1 (SEQ ID NO: 4)) are provided having amino acid sequences which are shorter, or longer than NC_017053.1 (SEQ ID NO: 4) by about 5 amino acids, by about 10 amino acids, by about 15 amino acids, by about 20 amino acids, by about 25 amino acids, by about 30 amino acids, by about 40 amino acids, by about 50 amino acids, by about 75 amino acids, by about 100 amino acids or more.

[0357] In one embodiment, the dead Cas9 may be based on the canonical SpCas9 sequence of Q99ZW2 and may have the following sequence, which comprises a D10X and an H810X, wherein X may be any amino acid, substitutions (underlined and bolded), or a variant be variant of SEQ ID NO: 40 having at least 80%, at least 85%, at least 90%, at least 95%, or at least 99% sequence identity thereto.

[0358] In one embodiment, the dead Cas9 may be based on the canonical SpCas9 sequence of Q99ZW2 and may have the following sequence, which comprises a D10A and an H810A substitutions (underlined and bolded), or be a variant of SEQ ID NO: 23 having at least 80%, at least 85%, at least 90%, at least 95%, or at least 99% sequence identity thereto.

| | | SEQ |
|---|---|---|
| Description | Sequence | ID NO: |
| dead Cas9 or | MDKKYSIGLXIGTNSVGWAVITDEYKVPSKKFKVLGNTDRHSIKKNLIGALLEDSG | 22 |
| dCas9 | ETAEATRLKRTARRRYTRRKNRICYLQEIFSNEMAKVDDSFFHRLEESFLVEEDKK | |
| Streptococcus | HERHPIFGNIVDEVAYHEKYPTIYHLRKKLVDSTDKADLRLIYLALAHMIKERGHFL | |
| pyogenes | IEGDLNPDNSDVDKLFIQLVQTYNQLFEENPINASGVDAKAILSARLSKSRRLENLIA | |
| Q99ZW2 Cas9 | QLPGEKKNGLFGNLIALSLGLTPNFKSNFDLAEDAKLQLSKDTYDDDLDNLLAQIG | |
| with D10X and | DQYADLFLAAKNLSDAILLSDILRVNTEITKAPLSASMIKRYDEHHQDLTLLKALVR | |
| H810X | QQLPEKYKEIFFDQSKNGYAGYIDGGASQEEFYKFIKPILEKMDGTEELLVKLNRED | |
| Where “X” is | LLRKQRTFDNGSIPHQIHLGELHAILRRQEDFYPFLKDNREKIEKILTFRIPYYVGPLA | |
| any amino acid | RGNSRFAWMTRKSEETITPWNFEEVVDKGASAQSFIERMTNFDKNLPNEKVLPKHS | |
| | LLYEYFTVYNELTKVKYVTEGMRKPAFLSGEQKKAIVDLLFKTNRKVTVKQLKED | |
| | YFKKIECFDSVEISGVEDRENASLGTYHDLLKIIKDKDFLDNEENEDILEDIVLTLTLF | |
| | EDREMIEERLKTYAHLEDDKVMKQLKRRRYTGWGRLSRKLINGIRDKQSGKTILDF | |
| | LKSDGFANRNFMQLIHDDSLTFKEDIQKAQVSGQGDSLHEHIANLAGSPAIKKGILQ | |
| | TVKVVDELVKVMGRHKPENIVIEMARENQTTQKGQKNSRERMKRIEEGIKELGSQI | |
| | LKEHPVENTQLQNEKLYLYYLQNGRDMYVDQELDINRLSDYDVDXIVPQSFLKDD | |
| | SIDNKVLTRSDKNRGKSDNVPSEEVVKKMKNYWRQLLNAKLITQRKEDNLTKAER | |
| | GGLSELDKAGFIKRQLVETRQITKHVAQILDSRMNTKYDENDKLIREVKVITLKSKL | |
| | VSDFRKDFQFYKVREINNYHHAHDAYLNAVVGTALIKKYPKLESEFVYGDYKVYD | |
| | VRKMIAKSEQEIGKATAKYFFYSNIMNFFKTEITLANGEIRKRPLIETNGETGEIVWD | |
| | KGRDFATVRKVLSMPQVNIVKKTEVQTGGFSKESILPKRNSDKLIARKKDWDPKK | |
| | YGGFDSPTVAYSVLVVAKVEKGKSKKLKSVKELLGITIMERSSFEKNPIDFLEAKG | |
| | YKEVKKDLIKLPKYSLFELENGRKRMLASAGELQKGNELALPSKYVNFLYLASHY | |
| | EKLKGSPEDNEQKQLFVEQHKHYLDEIIEQISEFSKRVILADANLDKVLSAYNKHRD | |
| | KPIREQAENIIHLFTLTNLGAPAAFKYFDTTIDRKRYTSTKEVLDATLIHQSITGLYET | |
| | RIDLSQLGGD | |
| dead Cas9 or | MDKKYSIGLAIGTNSVGWAVITDEYKVPSKKFKVLGNTDRHSIKKNLIGALLEDSG | 23 |
| dCas9 | ETAEATRLKRTARRRYTRRKNRICYLQEIFSNEMAKVDDSFFHRLEESFLVEEDKK | |
| Streptococcus | HERHPIFGNIVDEVAYHEKYPTIYHLRKKLVDSTDKADLRLIYLALAHMIKERGHFL | |
| pyogenes | IEGDLNPDNSDVDKLFIQLVQTYNQLFEENPINASGVDAKAILSARLSKSRRLENLIA | |
| Q99ZW2 Cas9 | QLPGEKKNGLFGNLIALSLGLTPNFKSNFDLAEDAKLQLSKDTYDDDLDNLLAQIG | |
| with D10A and | DQYADLFLAAKNLSDAILLSDILRVNTEITKAPLSASMIKRYDEHHQDLTLLKALVR | |
| H810A | QQLPEKYKEIFFDQSKNGYAGYIDGGASQEEFYKFIKPILEKMDGTEELLVKLNRED | |
| | LLRKQRTFDNGSIPHQIHLGELHAILRRQEDFYPFLKDNREKIEKILTFRIPYYVGPLA | |
| | RGNSRFAWMTRKSEETITPWNFEEVVDKGASAQSFIERMTNFDKNLPNEKVLPKHS | |
| | LLYEYFTVYNELTKVKYVTEGMRKPAFLSGEQKKAIVDLLFKTNRKVTVKQLKED | |
| | YFKKIECFDSVEISGVEDRFNASLGTYHDLLKIIKDKDFLDNEENEDILEDIVLTLTLF | |
| | EDREMIEERLKTYAHLEDDKVMKQLKRRRYTGWGRLSRKLINGIRDKQSGKTILDF | |
| | LKSDGFANRNFMQLIHDDSLTFKEDIQKAQVSGQGDSLHEHIANLAGSPAIKKGILQ | |
| | TVKVVDELVKVMGRHKPENIVIEMARENQTTQKGQKNSRERMKRIEEGIKELGSQI | |
| | LKEHPVENTQLQNEKLYLYYLQNGRDMYVDQELDINRLSDYDVDAIVPQSFLKDD | |
| | SIDNKVLTRSDKNRGKSDNVPSEEVVKKMKNYWRQLLNAKLITQRKFDNLTKAER | |
| | GGLSELDKAGFIKRQLVETRQITKHVAQILDSRMNTKYDENDKLIREVKVITLKSKL | |
| | VSDFRKDFQFYKVREINNYHHAHDAYLNAVVGTALIKKYPKLESEFVYGDYKVYD | |
| | VRKMIAKSEQEIGKATAKYFFYSNIMNFFKTEITLANGEIRKRPLIETNGETGEIVWD | |
| | KGRDFATVRKVLSMPQVNIVKKTEVQTGGFSKESILPKRNSDKLIARKKDWDPKK | |
| | YGGFDSPTVAYSVLVVAKVEKGKSKKLKSVKELLGITIMERSSFEKNPIDFLEAKG | |
| | YKEVKKDLIKLPKYSLFELENGRKRMLASAGELQKGNELALPSKYVNFLYLASHY | |
| | EKLKGSPEDNEQKQLFVEQHKHYLDEIIEQISEFSKRVILADANLDKVLSAYNKHRD | |
| | KPIREQAENIIHLFTLTNLGAPAAFKYFDTTIDRKRYTSTKEVLDATLIHQSITGLYET | |
| | RIDLSQLGGD | |

### D. Cas9 Nickase Variant

[0359] In one embodiment, the prime editors utilized in the methods and compositions described herein comprise a Cas9 nickase. The term “Cas9 nickase” or “nCas9” refers to a variant of Cas9 which is capable of introducing a single-strand break in a double strand DNA molecule target. In some embodiments, the Cas9 nickase comprises only a single functioning nuclease domain. The wild type Cas9 (e.g., the canonical SpCas9) comprises two separate nuclease domains, namely, the RuvC domain (which cleaves the non-protospacer DNA strand) and HNH domain (which cleaves the protospacer DNA strand). In one embodiment, the Cas9 nickase comprises a mutation in the RuvC domain which inactivates the RuvC nuclease activity. For example, mutations in aspartate (D) 10, histidine (H) 983, aspartate (D) 986, or glutamate (E) 762, have been reported as loss-of-function mutations of the RuvC nuclease domain and the creation of a functional Cas9 nickase (e.g., Nishimasu et al., “Crystal structure of Cas9 in complex with guide RNA and target DNA,” Cell 156(5), 935-949, which is incorporated herein by reference). Thus, nickase mutations in the RuvC domain could include D10X, H983X, D986X, or E762X, wherein X is any amino acid other than the wild type amino acid. In certain embodiments, the nickase could be D10A, of H983A, D986A, or E762A, or a combination thereof.

[0360] In various embodiments, the Cas9 nickase can have a mutation in the RuvC nuclease domain and have one of the following amino acid sequences, or a variant thereof having an amino acid sequence that has at least 80%, at least 85%, at least 90%, at least 95%, or at least 99% sequence identity thereto.

| | | SEQ ID |
|---|---|---|
| Description | Sequence | NO: |
| Cas9 nickase | MDKKYSIGLXIGTNSVGWAVITDEYKVPSKKFKVLGNTDRHSIKKNLIGALLEDS | 24 |
| Streptococcus | GETAEATRLKRTARRRYTRRKNRICYLQEIFSNEMAKVDDSFFHRLEESFLVEEDK | |
| pyogenes | KHERHPIFGNIVDEVAYHEKYPTIYHLRKKLVDSTDKADLRLIYLALAHMIKERGH | |
| Q99ZW2 Cas9 | FLIEGDLNPDNSDVDKLFIQLVQTYNQLFEENPINASGVDAKAILSARLSKSRRLEN | |
| with D10X, | LIAQLPGEKKNGLFGNLIALSLGLTPNFKSNFDLAEDAKLQLSKDTYDDDLDNLL | |
| wherein X is any | AQIGDQYADLFLAAKNLSDAILLSDILRVNTEITKAPLSASMIKRYDEHHQDLTLL | |
| alternate amino | KALVRQQLPEKYKEIFFDQSKNGYAGYIDGGASQEEFYKFIKPILEKMDGTEELLV | |
| acid | KLNREDLLRKQRTFDNGSIPHQIHLGELHAILRRQEDFYPFLKDNREKIEKILTFRIP | |
| | YYVGPLARGNSRFAWMTRKSEETITPWNFEEVVDKGASAQSFIERMTNFDKNLP | |
| | NEKVLPKHSLLYEYFTVYNELTKVKYVTEGMRKPAFLSGEQKKAIVDLLEKTNR | |
| | KVTVKQLKEDYFKKIECFDSVEISGVEDRENASLGTYHDLLKIIKDKDFLDNEENE | |
| | DILEDIVLTLTLFEDREMIEERLKTYAHLEDDKVMKQLKRRRYTGWGRLSRKLIN | |
| | GIRDKQSGKTILDFLKSDGFANRNFMQLIHDDSLTFKEDIQKAQVSGQGDSLHEHI | |
| | ANLAGSPAIKKGILQTVKVVDELVKVMGRHKPENIVIEMARENQTTQKGQKNSR | |
| | ERMKRIEEGIKELGSQILKEHPVENTQLQNEKLYLYYLQNGRDMYVDQELDINRL | |
| | SDYDVDHIVPQSFLKDDSIDNKVLTRSDKNRGKSDNVPSEEVVKKMKNYWRQLL | |
| | NAKLITQRKFDNLTKAERGGLSELDKAGFIKRQLVETRQITKHVAQILDSRMNTK | |
| | YDENDKLIREVKVITLKSKLVSDFRKDFQFYKVREINNYHHAHDAYLNAVVGTA | |
| | LIKKYPKLESEFVYGDYKVYDVRKMIAKSEQEIGKATAKYFFYSNIMNFFKTEITL | |
| | ANGEIRKRPLIETNGETGEIVWDKGRDFATVRKVLSMPQVNIVKKTEVQTGGFSK | |
| | ESILPKRNSDKLIARKKDWDPKKYGGFDSPTVAYSVLVVAKVEKGKSKKLKSVK | |
| | ELLGITIMERSSFEKNPIDFLEAKGYKEVKKDLIIKLPKYSLFELENGRKRMLASAG | |
| | ELQKGNELALPSKYVNFLYLASHYEKLKGSPEDNEQKQLFVEQHKHYLDEIIEQIS | |
| | EFSKRVILADANLDKVLSAYNKHRDKPIREQAENIIHLFTLTNLGAPAAFKYEDTTI | |
| | DRKRYTSTKEVLDATLIHQSITGLYETRIDLSQLGGD | |
| Cas9 nickase | MDKKYSIGLDIGTNSVGWAVITDEYKVPSKKFKVLGNTDRHSIKKNLIGALLEDS | 25 |
| Streptococcus | GETAEATRLKRTARRRYTRRKNRICYLQEIFSNEMAKVDDSFFHRLEESFLVEEDK | |
| pyogenes | KHERHPIFGNIVDEVAYHEKYPTIYHLRKKLVDSTDKADLRLIYLALAHMIKERGH | |
| Q99ZW2 Cas9 | FLIEGDLNPDNSDVDKLFIQLVQTYNQLFEENPINASGVDAKAILSARLSKSRRLEN | |
| with E762X, | LIAQLPGEKKNGLFGNLIALSLGLTPNFKSNFDLAEDAKLQLSKDTYDDDLDNLL | |
| wherein X is any | AQIGDQYADLFLAAKNLSDAILLSDILRVNTEITKAPLSASMIKRYDEHHQDLTLL | |
| alternate amino | KALVRQQLPEKYKEIFFDQSKNGYAGYIDGGASQEEFYKFIKPILEKMDGTEELLV | |
| acid | KLNREDLLRKQRTFDNGSIPHQIHLGELHAILRRQEDFYPFLKDNREKIEKILTFRIP | |
| | YYVGPLARGNSRFAWMTRKSEETITPWNFEEVVDKGASAQSFIERMTNFDKNLP | |
| | NEKVLPKHSLLYEYFTVYNELTKVKYVTEGMRKPAFLSGEQKKAIVDLLEKTNR | |
| | KVTVKQLKEDYFKKIECFDSVEISGVEDRENASLGTYHDLLKIIKDKDFLDNEENE | |
| | DILEDIVLTLTLFEDREMIEERLKTYAHLEDDKVMKQLKRRRYTGWGRLSRKLIN | |
| | GIRDKQSGKTILDFLKSDGFANRNFMQLIHDDSLTFKEDIQKAQVSGQGDSLHEHI | |
| | ANLAGSPAIKKGILQTVKVVDELVKVMGRHKPENIVIXMARENQTTQKGQKNSR | |
| | ERMKRIEEGIKELGSQILKEHPVENTQLQNEKLYLYYLQNGRDMYVDQELDINRL | |
| | SDYDVDHIVPQSFLKDDSIDNKVLTRSDKNRGKSDNVPSEEVVKKMKNYWRQLL | |
| | NAKLITQRKFDNLTKAERGGLSELDKAGFIKRQLVETRQITKHVAQILDSRMNTK | |
| | YDENDKLIREVKVITLKSKLVSDFRKDFQFYKVREINNYHHAHDAYLNAVVGTA | |
| | LIKKYPKLESEFVYGDYKVYDVRKMIAKSEQEIGKATAKYFFYSNIMNFFKTEITL | |
| | ANGEIRKRPLIETNGETGEIVWDKGRDFATVRKVLSMPQVNIVKKTEVQTGGFSK | |
| | ESILPKRNSDKLIARKKDWDPKKYGGFDSPTVAYSVLVVAKVEKGKSKKLKSVK | |
| | ELLGITIMERSSFEKNPIDFLEAKGYKEVKKDLIIKLPKYSLFELENGRKRMLASAG | |
| | ELQKGNELALPSKYVNFLYLASHYEKLKGSPEDNEQKQLFVEQHKHYLDEIIEQIS | |
| | EFSKRVILADANLDKVLSAYNKHRDKPIREQAENIIHLFTLTNLGAPAAFKYFDTTI | |
| | DRKRYTSTKEVLDATLIHQSITGLYETRIDLSQLGGD | |
| Cas9 nickase | MDKKYSIGLDIGTNSVGWAVITDEYKVPSKKFKVLGNTDRHSIKKNLIGALLEDS | 26 |
| Streptococcus | GETAEATRLKRTARRRYTRRKNRICYLQEIFSNEMAKVDDSFFHRLEESFLVEEDK | |
| pyogenes | KHERHPIFGNIVDEVAYHEKYPTIYHLRKKLVDSTDKADLRLIYLALAHMIKFRGH | |
| Q99ZW2 Cas9 | FLIEGDLNPDNSDVDKLFIQLVQTYNQLFEENPINASGVDAKAILSARLSKSRRLEN | |
| with H983X, | LIAQLPGEKKNGLFGNLIALSLGLTPNFKSNFDLAEDAKLQLSKDTYDDDLDNLL | |
| wherein X is any | AQIGDQYADLFLAAKNLSDAILLSDILRVNTEITKAPLSASMIKRYDEHHQDLTLL | |
| alternate amino | KALVRQQLPEKYKEIFFDQSKNGYAGYIDGGASQEEFYKFIKPILEKMDGTEELLV | |
| acid | KLNREDLLRKQRTFDNGSIPHQIHLGELHAILRRQEDFYPFLKDNREKIEKILTFRIP | |
| | YYVGPLARGNSRFAWMTRKSEETITPWNFEEVVDKGASAQSFIERMTNFDKNLP | |
| | NEKVLPKHSLLYEYFTVYNELTKVKYVTEGMRKPAFLSGEQKKAIVDLLFKTNR | |
| | KVTVKQLKEDYFKKIECFDSVEISGVEDRFNASLGTYHDLLKIIKDKDFLDNEENE | |
| | DILEDIVLTLTLFEDREMIEERLKTYAHLEDDKVMKQLKRRRYTGWGRLSRKLIN | |
| | GIRDKQSGKTILDFLKSDGFANRNFMQLIHDDSLTFKEDIQKAQVSGQGDSLHEHI | |
| | ANLAGSPAIKKGILQTVKVVDELVKVMGRHKPENIVIEMARENQTTQKGQKNSR | |
| | ERMKRIEEGIKELGSQILKEHPVENTQLQNEKLYLYYLQNGRDMYVDQELDINRL | |
| | SDYDVDHIVPQSFLKDDSIDNKVLTRSDKNRGKSDNVPSEEVVKKMKNYWRQLL | |
| | NAKLITQRKFDNLTKAERGGLSELDKAGFIKRQLVETRQITKHVAQILDSRMNTK | |
| | YDENDKLIREVKVITLKSKLVSDFRKDFQFYKVREINNYHXAHDAYLNAVVGTA | |
| | LIKKYPKLESEFVYGDYKVYDVRKMIAKSEQEIGKATAKYFFYSNIMNFFKTEITL | |
| | ANGEIRKRPLIETNGETGEIVWDKGRDFATVRKVLSMPQVNIVKKTEVQTGGFSK | |
| | ESILPKRNSDKLIARKKDWDPKKYGGFDSPTVAYSVLVVAKVEKGKSKKLKSVK | |
| | ELLGITIMERSSFEKNPIDFLEAKGYKEVKKDLIIKLPKYSLFELENGRKRMLASAG | |
| | ELQKGNELALPSKYVNFLYLASHYEKLKGSPEDNEQKQLFVEQHKHYLDEIIEQIS | |
| | EFSKRVILADANLDKVLSAYNKHRDKPIREQAENIIHLFTLTNLGAPAAFKYEDTTI | |
| | DRKRYTSTKEVLDATLIHQSITGLYETRIDLSQLGGD | |
| Cas9 nickase | MDKKYSIGLDIGTNSVGWAVITDEYKVPSKKFKVLGNTDRHSIKKNLIGALLEDS | 27 |
| Streptococcus | GETAEATRLKRTARRRYTRRKNRICYLQEIFSNEMAKVDDSFFHRLEESFLVEEDK | |
| pyogenes | KHERHPIFGNIVDEVAYHEKYPTIYHLRKKLVDSTDKADLRLIYLALAHMIKERGH | |
| Q99ZW2 Cas9 | FLIEGDLNPDNSDVDKLFIQLVQTYNQLFEENPINASGVDAKAILSARLSKSRRLEN | |
| with D986X, | LIAQLPGEKKNGLFGNLIALSLGLTPNFKSNFDLAEDAKLQLSKDTYDDDLDNLL | |
| wherein X is any | AQIGDQYADLFLAAKNLSDAILLSDILRVNTEITKAPLSASMIKRYDEHHQDLTLL | |
| alternate amino | KALVRQQLPEKYKEIFFDQSKNGYAGYIDGGASQEEFYKFIKPILEKMDGTEELLV | |
| acid | KLNREDLLRKQRTFDNGSIPHQIHLGELHAILRRQEDFYPFLKDNREKIEKILTFRIP | |
| | YYVGPLARGNSRFAWMTRKSEETITPWNFEEVVDKGASAQSFIERMTNFDKNLP | |
| | NEKVLPKHSLLYEYFTVYNELTKVKYVTEGMRKPAFLSGEQKKAIVDLLFKTNR | |
| | KVTVKQLKEDYFKKIECFDSVEISGVEDRFNASLGTYHDLLKIIKDKDFLDNEENE | |
| | DILEDIVLTLTLFEDREMIEERLKTYAHLEDDKVMKQLKRRRYTGWGRLSRKLIN | |
| | GIRDKQSGKTILDFLKSDGFANRNFMQLIHDDSLTFKEDIQKAQVSGQGDSLHEHI | |
| | ANLAGSPAIKKGILQTVKVVDELVKVMGRHKPENIVIEMARENQTTQKGQKNSR | |
| | ERMKRIEEGIKELGSQILKEHPVENTQLQNEKLYLYYLQNGRDMYVDQELDINRL | |
| | SDYDVDHIVPQSFLKDDSIDNKVLTRSDKNRGKSDNVPSEEVVKKMKNYWRQLL | |
| | NAKLITQRKFDNLTKAERGGLSELDKAGFIKRQLVETRQITKHVAQILDSRMNTK | |
| | YDENDKLIREVKVITLKSKLVSDFRKDFQFYKVREINNYHHAHXAYLNAVVGTA | |
| | LIKKYPKLESEFVYGDYKVYDVRKMIAKSEQEIGKATAKYFFYSNIMNFFKTEITL | |
| | ANGEIRKRPLIETNGETGEIVWDKGRDFATVRKVLSMPQVNIVKKTEVQTGGFSK | |
| | ESILPKRNSDKLIARKKDWDPKKYGGFDSPTVAYSVLVVAKVEKGKSKKLKSVK | |
| | ELLGITIMERSSFEKNPIDFLEAKGYKEVKKDLIIKLPKYSLFELENGRKRMLASAG | |
| | ELQKGNELALPSKYVNFLYLASHYEKLKGSPEDNEQKQLFVEQHKHYLDEIIEQIS | |
| | EFSKRVILADANLDKVLSAYNKHRDKPIREQAENIIHLFTLTNLGAPAAFKYEDTTI | |
| | DRKRYTSTKEVLDATLIHQSITGLYETRIDLSQLGGD | |
| Cas9 nickase | MDKKYSIGLAIGTNSVGWAVITDEYKVPSKKFKVLGNTDRHSIKKNLIGALLEDS | 28 |
| Streptococcus | GETAEATRLKRTARRRYTRRKNRICYLQEIFSNEMAKVDDSFFHRLEESELVEEDK | |
| pyogenes | KHERHPIFGNIVDEVAYHEKYPTIYHLRKKLVDSTDKADLRLIYLALAHMIKERGH | |
| Q99ZW2 Cas9 | FLIEGDLNPDNSDVDKLFIQLVQTYNQLFEENPINASGVDAKAILSARLSKSRRLEN | |
| with D10A | LIAQLPGEKKNGLFGNLIALSLGLTPNFKSNFDLAEDAKLQLSKDTYDDDLDNLL | |
| | AQIGDQYADLFLAAKNLSDAILLSDILRVNTEITKAPLSASMIKRYDEHHQDLTLL | |
| | KALVRQQLPEKYKEIFFDQSKNGYAGYIDGGASQEEFYKFIKPILEKMDGTEELLV | |
| | KLNREDLLRKQRTFDNGSIPHQIHLGELHAILRRQEDFYPFLKDNREKIEKILTFRIP | |
| | YYVGPLARGNSRFAWMTRKSEETITPWNFEEVVDKGASAQSFIERMTNFDKNLP | |
| | NEKVLPKHSLLYEYFTVYNELTKVKYVTEGMRKPAFLSGEQKKAIVDLLEKTNR | |
| | KVTVKQLKEDYFKKIECFDSVEISGVEDRENASLGTYHDLLKIIKDKDFLDNEENE | |
| | DILEDIVLTLTLFEDREMIEERLKTYAHLEDDKVMKQLKRRRYTGWGRLSRKLIN | |
| | GIRDKQSGKTILDFLKSDGFANRNFMQLIHDDSLTFKEDIQKAQVSGQGDSLHEHI | |
| | ANLAGSPAIKKGILQTVKVVDELVKVMGRHKPENIVIEMARENQTTQKGQKNSR | |
| | ERMKRIEEGIKELGSQILKEHPVENTQLQNEKLYLYYLQNGRDMYVDQELDINRL | |
| | SDYDVDHIVPQSFLKDDSIDNKVLTRSDKNRGKSDNVPSEEVVKKMKNYWRQLL | |
| | NAKLITQRKFDNLTKAERGGLSELDKAGFIKRQLVETRQITKHVAQILDSRMNTK | |
| | YDENDKLIREVKVITLKSKLVSDFRKDFQFYKVREINNYHHAHDAYLNAVVGTA | |
| | LIKKYPKLESEFVYGDYKVYDVRKMIAKSEQEIGKATAKYFFYSNIMNFFKTEITL | |
| | ANGEIRKRPLIETNGETGEIVWDKGRDFATVRKVLSMPQVNIVKKTEVQTGGFSK | |
| | ESILPKRNSDKLIARKKDWDPKKYGGFDSPTVAYSVLVVAKVEKGKSKKLKSVK | |
| | ELLGITIMERSSFEKNPIDFLEAKGYKEVKKDLIIKLPKYSLFELENGRKRMLASAG | |
| | ELQKGNELALPSKYVNFLYLASHYEKLKGSPEDNEQKQLFVEQHKHYLDEIIEQIS | |
| | EFSKRVILADANLDKVLSAYNKHRDKPIREQAENIIHLFTLTNLGAPAAFKYEDTTI | |
| | DRKRYTSTKEVLDATLIHQSITGLYETRIDLSQLGGD | |
| Cas9 nickase | MDKKYSIGLDIGTNSVGWAVITDEYKVPSKKFKVLGNTDRHSIKKNLIGALLEDS | 29 |
| Streptococcus | GETAEATRLKRTARRRYTRRKNRICYLQEIFSNEMAKVDDSFFHRLEESFLVEEDK | |
| pyogenes | KHERHPIFGNIVDEVAYHEKYPTIYHLRKKLVDSTDKADLRLIYLALAHMIKFRGH | |
| Q99ZW2 Cas9 | FLIEGDLNPDNSDVDKLFIQLVQTYNQLFEENPINASGVDAKAILSARLSKSRRLEN | |
| with E762A | LIAQLPGEKKNGLFGNLIALSLGLTPNFKSNFDLAEDAKLQLSKDTYDDDLDNLL | |
| | AQIGDQYADLFLAAKNLSDAILLSDILRVNTEITKAPLSASMIKRYDEHHQDLTLL | |
| | KALVRQQLPEKYKEIFFDQSKNGYAGYIDGGASQEEFYKFIKPILEKMDGTEELLV | |
| | KLNREDLLRKQRTFDNGSIPHQIHLGELHAILRRQEDFYPFLKDNREKIEKILTFRIP | |
| | YYVGPLARGNSRFAWMTRKSEETITPWNFEEVVDKGASAQSFIERMTNEDKNLP | |
| | NEKVLPKHSLLYEYFTVYNELTKVKYVTEGMRKPAFLSGEQKKAIVDLLEKTNR | |
| | KVTVKQLKEDYFKKIECFDSVEISGVEDRENASLGTYHDLLKIIKDKDFLDNEENE | |
| | DILEDIVLTLTLFEDREMIEERLKTYAHLEDDKVMKQLKRRRYTGWGRLSRKLIN | |
| | GIRDKQSGKTILDFLKSDGFANRNFMQLIHDDSLTFKEDIQKAQVSGQGDSLHEHI | |
| | ANLAGSPAIKKGILQTVKVVDELVKVMGRHKPENIVIAMARENQTTQKGQKNSR | |
| | ERMKRIEEGIKELGSQILKEHPVENTQLQNEKLYLYYLQNGRDMYVDQELDINRL | |
| | SDYDVDHIVPQSFLKDDSIDNKVLTRSDKNRGKSDNVPSEEVVKKMKNYWRQLL | |
| | NAKLITQRKFDNLTKAERGGLSELDKAGFIKRQLVETRQITKHVAQILDSRMNTK | |
| | YDENDKLIREVKVITLKSKLVSDFRKDFQFYKVREINNYHHAHDAYLNAVVGTA | |
| | LIKKYPKLESEFVYGDYKVYDVRKMIAKSEQEIGKATAKYFFYSNIMNFFKTEITL | |
| | ANGEIRKRPLIETNGETGEIVWDKGRDFATVRKVLSMPQVNIVKKTEVQTGGFSK | |
| | ESILPKRNSDKLIARKKDWDPKKYGGFDSPTVAYSVLVVAKVEKGKSKKLKSVK | |
| | ELLGITIMERSSFEKNPIDFLEAKGYKEVKKDLIIKLPKYSLFELENGRKRMLASAG | |
| | ELQKGNELALPSKYVNFLYLASHYEKLKGSPEDNEQKQLFVEQHKHYLDEIIEQIS | |
| | EFSKRVILADANLDKVLSAYNKHRDKPIREQAENIIHLFTLTNLGAPAAFKYEDTTI | |
| | DRKRYTSTKEVLDATLIHQSITGLYETRIDLSQLGGD | |
| Cas9 nickase | MDKKYSIGLDIGTNSVGWAVITDEYKVPSKKFKVLGNTDRHSIKKNLIGALLEDS | 30 |
| Streptococcus | GETAEATRLKRTARRRYTRRKNRICYLQEIFSNEMAKVDDSFFHRLEESFLVEEDK | |
| pyogenes | KHERHPIFGNIVDEVAYHEKYPTIYHLRKKLVDSTDKADLRLIYLALAHMIKERGH | |
| Q99ZW2 Cas9 | FLIEGDLNPDNSDVDKLFIQLVQTYNQLFEENPINASGVDAKAILSARLSKSRRLEN | |
| with H983A | LIAQLPGEKKNGLFGNLIALSLGLTPNFKSNFDLAEDAKLQLSKDTYDDDLDNLL | |
| | AQIGDQYADLFLAAKNLSDAILLSDILRVNTEITKAPLSASMIKRYDEHHQDLTLL | |
| | KALVRQQLPEKYKEIFFDQSKNGYAGYIDGGASQEEFYKFIKPILEKMDGTEELLV | |
| | KLNREDLLRKQRTFDNGSIPHQIHLGELHAILRRQEDFYPFLKDNREKIEKILTFRIP | |
| | YYVGPLARGNSRFAWMTRKSEETITPWNFEEVVDKGASAQSFIERMTNFDKNLP | |
| | NEKVLPKHSLLYEYFTVYNELTKVKYVTEGMRKPAFLSGEQKKAIVDLLFKTNR | |
| | KVTVKQLKEDYFKKIECFDSVEISGVEDRFNASLGTYHDLLKIIKDKDELDNEENE | |
| | DILEDIVLTLTLFEDREMIEERLKTYAHLEDDKVMKQLKRRRYTGWGRLSRKLIN | |
| | GIRDKQSGKTILDELKSDGFANRNFMQLIHDDSLTFKEDIQKAQVSGQGDSLHEHI | |
| | ANLAGSPAIKKGILQTVKVVDELVKVMGRHKPENIVIEMARENQTTQKGQKNSR | |
| | ERMKRIEEGIKELGSQILKEHPVENTQLQNEKLYLYYLQNGRDMYVDQELDINRL | |
| | SDYDVDHIVPQSFLKDDSIDNKVLTRSDKNRGKSDNVPSEEVVKKMKNYWRQLL | |
| | NAKLITQRKFDNLTKAERGGLSELDKAGFIKRQLVETRQITKHVAQILDSRMNTK | |
| | YDENDKLIREVKVITLKSKLVSDFRKDFQFYKVREINNYHAAHDAYLNAVVGTA | |
| | LIKKYPKLESEFVYGDYKVYDVRKMIAKSEQEIGKATAKYFFYSNIMNFFKTEITL | |
| | ANGEIRKRPLIETNGETGEIVWDKGRDFATVRKVLSMPQVNIVKKTEVQTGGFSK | |
| | ESILPKRNSDKLIARKKDWDPKKYGGFDSPTVAYSVLVVAKVEKGKSKKLKSVK | |
| | ELLGITIMERSSFEKNPIDFLEAKGYKEVKKDLIIKLPKYSLFELENGRKRMLASAG | |
| | ELQKGNELALPSKYVNFLYLASHYEKLKGSPEDNEQKQLFVEQHKHYLDEIIEQIS | |
| | EFSKRVILADANLDKVLSAYNKHRDKPIREQAENIIHLFTLTNLGAPAAFKYEDTTI | |
| | DRKRYTSTKEVLDATLIHQSITGLYETRIDLSQLGGD | |
| Cas9 nickase | MDKKYSIGLDIGTNSVGWAVITDEYKVPSKKFKVLGNTDRHSIKKNLIGALLEDS | 31 |
| Streptococcus | GETAEATRLKRTARRRYTRRKNRICYLQEIFSNEMAKVDDSFFHRLEESFLVEEDK | |
| pyogenes | KHERHPIFGNIVDEVAYHEKYPTIYHLRKKLVDSTDKADLRLIYLALAHMIKFRGH | |
| Q99ZW2 Cas9 | FLIEGDLNPDNSDVDKLFIQLVQTYNQLFEENPINASGVDAKAILSARLSKSRRLEN | |
| with D986A | LIAQLPGEKKNGLFGNLIALSLGLTPNFKSNFDLAEDAKLQLSKDTYDDDLDNLL | |
| | AQIGDQYADLFLAAKNLSDAILLSDILRVNTEITKAPLSASMIKRYDEHHQDLTLL | |
| | KALVRQQLPEKYKEIFFDQSKNGYAGYIDGGASQEEFYKFIKPILEKMDGTEELLV | |
| | KLNREDLLRKQRTFDNGSIPHQIHLGELHAILRRQEDFYPFLKDNREKIEKILTFRIP | |
| | YYVGPLARGNSRFAWMTRKSEETITPWNFEEVVDKGASAQSFIERMTNEDKNLP | |
| | NEKVLPKHSLLYEYFTVYNELTKVKYVTEGMRKPAFLSGEQKKAIVDLLEKTNR | |
| | KVTVKQLKEDYFKKIECFDSVEISGVEDRENASLGTYHDLLKIIKDKDFLDNEENE | |
| | DILEDIVLTLTLFEDREMIEERLKTYAHLEDDKVMKQLKRRRYTGWGRLSRKLIN | |
| | GIRDKQSGKTILDFLKSDGFANRNFMQLIHDDSLTFKEDIQKAQVSGQGDSLHEHI | |
| | ANLAGSPAIKKGILQTVKVVDELVKVMGRHKPENIVIEMARENQTTQKGQKNSR | |
| | ERMKRIEEGIKELGSQILKEHPVENTQLQNEKLYLYYLQNGRDMYVDQELDINRL | |
| | SDYDVDHIVPQSFLKDDSIDNKVLTRSDKNRGKSDNVPSEEVVKKMKNYWRQLL | |
| | NAKLITQRKFDNLTKAERGGLSELDKAGFIKRQLVETRQITKHVAQILDSRMNTK | |
| | YDENDKLIREVKVITLKSKLVSDFRKDFQFYKVREINNYHHAHAAYLNAVVGTA | |
| | LIKKYPKLESEFVYGDYKVYDVRKMIAKSEQEIGKATAKYFFYSNIMNFFKTEITL | |
| | ANGEIRKRPLIETNGETGEIVWDKGRDFATVRKVLSMPQVNIVKKTEVQTGGFSK | |
| | ESILPKRNSDKLIARKKDWDPKKYGGFDSPTVAYSVLVVAKVEKGKSKKLKSVK | |
| | ELLGITIMERSSFEKNPIDFLEAKGYKEVKKDLIIKLPKYSLFELENGRKRMLASAG | |
| | ELQKGNELALPSKYVNFLYLASHYEKLKGSPEDNEQKQLFVEQHKHYLDEITEQIS | |
| | EFSKRVILADANLDKVLSAYNKHRDKPIREQAENIIHLFTLTNLGAPAAFKYEDTTI | |
| | DRKRYTSTKEVLDATLIHQSITGLYETRIDLSQLGGD | |

[0361] In another embodiment, the Cas9 nickase comprises a mutation in the HNH domain which inactivates the HNH nuclease activity. For example, mutations in histidine (Q) 840 or asparagine (R) 863 have been reported as loss-of-function mutations of the HNH nuclease domain and the creation of a functional Cas9 nickase (e.g., Nishimasu et al., “Crystal structure of Cas9 in complex with guide RNA and target DNAS” Cell 156(5), 935-949, which is incorporated herein by reference). Thus, nickase mutations in the HNH domain could include H84KX and R863X, wherein X is any amino acid other than the wild type amino acid. In certain embodiments, the nickase could be H840A or R863A or a combination thereof.

[0362] In various embodiments, the Cas9 nickase can have a mutation in the HNH nuclease domain and have one of the following amino acid sequences, or a variant thereof having an amino acid sequence that has at least 80%, at least 85%, at least 90%, at least 95%, or at least 99% sequence identity thereto.

| | | SEQ |
|---|---|---|
| Description | Sequence | ID NO: |
| Cas9 nickase | MDKKYSIGLDIGTNSVGWAVITDEYKVPSKKFKVLGNTDRHSIKKNLIGALLEDSG | 32 |
| Streptococcus | ETAEATRLKRTARRRYTRRKNRICYLQEIFSNEMAKVDDSFFHRLEESFLVEEDKK | |
| pyogenes | HERHPIFGNIVDEVAYHEKYPTIYHLRKKLVDSTDKADLRLIYLALAHMIKFRGHFL | |
| Q99ZW2 Cas9 | IEGDLNPDNSDVDKLFIQLVQTYNQLFEENPINASGVDAKAILSARLSKSRRLENLIA | |
| with H840X, | QLPGEKKNGLFGNLIALSLGLTPNFKSNFDLAEDAKLQLSKDTYDDDLDNLLAQIG | |
| wherein X is any | DQYADLFLAAKNLSDAILLSDILRVNTEITKAPLSASMIKRYDEHHQDLTLLKALVR | |
| alternate amino | QQLPEKYKEIFFDQSKNGYAGYIDGGASQEEFYKFIKPILEKMDGTEELLVKLNRED | |
| acid | LLRKQRTFDNGSIPHQIHLGELHAILRRQEDFYPFLKDNREKIEKILTFRIPYYVGPLA | |
| | RGNSRFAWMTRKSEETITPWNFEEVVDKGASAQSFIERMTNFDKNLPNEKVLPKHS | |
| | LLYEYFTVYNELTKVKYVTEGMRKPAFLSGEQKKAIVDLLFKTNRKVTVKQLKED | |
| | YFKKIECFDSVEISGVEDRENASLGTYHDLLKIIKDKDFLDNEENEDILEDIVLTLTLF | |
| | EDREMIEERLKTYAHLEDDKVMKQLKRRRYTGWGRLSRKLINGIRDKQSGKTILDF | |
| | LKSDGFANRNFMQLIHDDSLTFKEDIQKAQVSGQGDSLHEHIANLAGSPAIKKGILQ | |
| | TVKVVDELVKVMGRHKPENIVIEMARENQTTQKGQKNSRERMKRIEEGIKELGSQI | |
| | LKEHPVENTQLQNEKLYLYYLQNGRDMYVDQELDINRLSDYDVDXIVPQSFLKDD | |
| | SIDNKVLTRSDKNRGKSDNVPSEEVVKKMKNYWRQLLNAKLITQRKFDNLTKAER | |
| | GGLSELDKAGFIKRQLVETRQITKHVAQILDSRMNTKYDENDKLIREVKVITLKSKL | |
| | VSDFRKDFQFYKVREINNYHHAHDAYLNAVVGTALIKKYPKLESEFVYGDYKVYD | |
| | VRKMIAKSEQEIGKATAKYFFYSNIMNFFKTEITLANGEIRKRPLIETNGETGEIVWD | |
| | KGRDFATVRKVLSMPQVNIVKKTEVQTGGFSKESILPKRNSDKLIARKKDWDPKK | |
| | YGGFDSPTVAYSVLVVAKVEKGKSKKLKSVKELLGITIMERSSFEKNPIDFLEAKG | |
| | YKEVKKDLIIKLPKYSLFELENGRKRMLASAGELQKGNELALPSKYVNFLYLASHY | |
| | EKLKGSPEDNEQKQLFVEQHKHYLDEIIEQISEFSKRVILADANLDKVLSAYNKHRD | |
| | KPIREQAENIIHLFTLTNLGAPAAFKYFDTTIDRKRYTSTKEVLDATLIHQSITGLYET | |
| | RIDLSQLGGD | |
| Cas9 nickase | MDKKYSIGLDIGTNSVGWAVITDEYKVPSKKFKVLGNTDRHSIKKNLIGALLEDSG | 33 |
| Streptococcus | ETAEATRLKRTARRRYTRRKNRICYLQEIFSNEMAKVDDSFFHRLEESFLVEEDKK | |
| pyogenes | HERHPIFGNIVDEVAYHEKYPTIYHLRKKLVDSTDKADLRLIYLALAHMIKFRGHFL | |
| Q99ZW2 Cas9 | IEGDLNPDNSDVDKLFIQLVQTYNQLFEENPINASGVDAKAILSARLSKSRRLENLIA | |
| with H840A | QLPGEKKNGLFGNLIALSLGLTPNFKSNEDLAEDAKLQLSKDTYDDDLDNLLAQIG | |
| | DQYADLFLAAKNLSDAILLSDILRVNTEITKAPLSASMIKRYDEHHQDLTLLKALVR | |
| | QQLPEKYKEIFFDQSKNGYAGYIDGGASQEEFYKFIKPILEKMDGTEELLVKLNRED | |
| | LLRKQRTFDNGSIPHQIHLGELHAILRRQEDFYPFLKDNREKIEKILTFRIPYYVGPLA | |
| | RGNSRFAWMTRKSEETITPWNFEEVVDKGASAQSFIERMTNFDKNLPNEKVLPKHS | |
| | LLYEYFTVYNELTKVKYVTEGMRKPAFLSGEQKKAIVDLLFKTNRKVTVKQLKED | |
| | YFKKIECFDSVEISGVEDRFNASLGTYHDLLKIIKDKDFLDNEENEDILEDIVLTLTLF | |
| | EDREMIEERLKTYAHLFDDKVMKQLKRRRYTGWGRLSRKLINGIRDKQSGKTILDF | |
| | LKSDGFANRNFMQLIHDDSLTFKEDIQKAQVSGQGDSLHEHIANLAGSPAIKKGILQ | |
| | TVKVVDELVKVMGRHKPENIVIEMARENQTTQKGQKNSRERMKRIEEGIKELGSQI | |
| | LKEHPVENTQLQNEKLYLYYLQNGRDMYVDQELDINRLSDYDVDAIVPQSFLKDD | |
| | SIDNKVLTRSDKNRGKSDNVPSEEVVKKMKNYWRQLLNAKLITQRKFDNLTKAER | |
| | GGLSELDKAGFIKRQLVETRQITKHVAQILDSRMNTKYDENDKLIREVKVITLKSKL | |
| | VSDFRKDFQFYKVREINNYHHAHDAYLNAVVGTALIKKYPKLESEFVYGDYKVYD | |
| | VRKMIAKSEQEIGKATAKYFFYSNIMNFFKTEITLANGEIRKRPLIETNGETGEIVWD | |
| | KGRDFATVRKVLSMPQVNIVKKTEVQTGGFSKESILPKRNSDKLIARKKDWDPKK | |
| | YGGFDSPTVAYSVLVVAKVEKGKSKKLKSVKELLGITIMERSSFEKNPIDFLEAKG | |
| | YKEVKKDLIIKLPKYSLFELENGRKRMLASAGELQKGNELALPSKYVNFLYLASHY | |
| | EKLKGSPEDNEQKQLFVEQHKHYLDEIIEQISEFSKRVILADANLDKVLSAYNKHRD | |
| | KPIREQAENIIHLFTLTNLGAPAAFKYFDTTIDRKRYTSTKEVLDATLIHQSITGLYET | |
| | RIDLSQLGGD | |
| Cas9 nickase | MDKKYSIGLDIGTNSVGWAVITDEYKVPSKKFKVLGNTDRHSIKKNLIGALLFDS | 34 |
| Streptococcus | ETAEATRLKRTARRRYTRRKNRICYLQEIFSNEMAKVDDSFFHRLEESFLVEEDKK | |
| pyogenes | HERHPIFGNIVDEVAYHEKYPTIYHLRKKLVDSTDKADLRLIYLALAHMIKFRGHFL | |
| Q99ZW2 Cas9 | HEGDLNPDNSDVDKLFIQLVQTYNQLFEENPINASGVDAKAILSARLSKSRRLENLIA | |
| with R863X, | QLPGEKKNGLFGNLIALSLGLTPNFKSNFDLAEDAKLQLSKDTYDDDLDNLLAQIG | |
| wherein X is any | DQYADLFLAAKNLSDAILLSDILRVNTEITKAPLSASMIKRYDEHHQDLTLLKALVR | |
| alternate amino | QQLPEKYKEIFFDQSKNGYAGYIDGGASQEEFYKFIKPILEKMDGTEELLVKLNRED | |
| acid | LLRKQRTFDNGSIPHQIHLGELHAILRRQEDFYPFLKDNREKIEKILTFRIPYYVGPLA | |
| | RGNSRFAWMTRKSEETITPWNFEEVVDKGASAQSFIERMTNFDKNLPNEKVLPKHS | |
| | LLYEYFTVYNELTKVKYVTEGMRKPAFLSGEQKKAIVDLLFKTNRKVTVKQLKED | |
| | YFKKIECFDSVEISGVEDRFNASLGTYHDLLKIIKDKDFLDNEENEDILEDIVLTLTLF | |
| | EDREMIEERLKTYAHLEDDKVMKQLKRRRYTGWGRLSRKLINGIRDKQSGKTILDF | |
| | LKSDGFANRNFMQLIHDDSLTFKEDIQKAQVSGQGDSLHEHIANLAGSPAIKKGILQ | |
| | TVKVVDELVKVMGRHKPENIVIEMARENQTTQKGQKNSRERMKRIEEGIKELGSQI | |
| | LKEHPVENTQLQNEKLYLYYLQNGRDMYVDQELDINRLSDYDVDHIVPQSFLKDD | |
| | SIDNKVLTRSDKNXGKSDNVPSEEVVKKMKNYWRQLLNAKLITQRKFDNLTKAER | |
| | GGLSELDKAGFIKRQLVETRQITKHVAQILDSRMNTKYDENDKLIREVKVITLKSKL | |
| | VSDFRKDFQFYKVREINNYHHAHDAYLNAVVGTALIKKYPKLESEFVYGDYKVYD | |
| | VRKMIAKSEQEIGKATAKYFFYSNIMNFFKTEITLANGEIRKRPLIETNGETGEIVWD | |
| | KGRDFATVRKVLSMPQVNIVKKTEVQTGGFSKESILPKRNSDKLIARKKDWDPKK | |
| | YGGFDSPTVAYSVLVVAKVEKGKSKKLKSVKELLGITIMERSSFEKNPIDFLEAKG | |
| | YKEVKKDLIIKLPKYSLFELENGRKRMLASAGELQKGNELALPSKYVNFLYLASHY | |
| | EKLKGSPEDNEQKQLFVEQHKHYLDEIIEQISEFSKRVILADANLDKVLSAYNKHRD | |
| | KPIREQAENIIHLFTLTNLGAPAAFKYFDTTIDRKRYTSTKEVLDATLIHQSITGLYET | |
| | RIDLSQLGGD | |
| Cas9 nickase | MDKKYSIGLDIGTNSVGWAVITDEYKVPSKKFKVLGNTDRHSIKKNLIGALLEDSG | 35 |
| Streptococcus | ETAEATRLKRTARRRYTRRKNRICYLQEIFSNEMAKVDDSFFHRLEESFLVEEDKK | |
| pyogenes | HERHPIFGNIVDEVAYHEKYPTIYHLRKKLVDSTDKADLRLIYLALAHMIKFRGHFL | |
| Q99ZW2 Cas9 | JEGDLNPDNSDVDKLFIQLVQTYNQLFEENPINASGVDAKAILSARLSKSRRLENLIA | |
| with R863A | QLPGEKKNGLFGNLIALSLGLTPNFKSNEDLAEDAKLQLSKDTYDDDLDNLLAQIG | |
| | DQYADLFLAAKNLSDAILLSDILRVNTEITKAPLSASMIKRYDEHHQDLTLLKALVR | |
| | QQLPEKYKEIFFDQSKNGYAGYIDGGASQEEFYKFIKPILEKMDGTEELLVKLNRED | |
| | LLRKQRTFDNGSIPHQIHLGELHAILRRQEDFYPFLKDNREKIEKILTFRIPYYVGPLA | |
| | RGNSRFAWMTRKSEETITPWNFEEVVDKGASAQSFIERMTNFDKNLPNEKVLPKHS | |
| | LLYEYFTVYNELTKVKYVTEGMRKPAFLSGEQKKAIVDLLFKTNRKVTVKQLKED | |
| | YFKKIECFDSVEISGVEDRFNASLGTYHDLLKIIKDKDFLDNEENEDILEDIVLTLTLF | |
| | EDREMIEERLKTYAHLEDDKVMKQLKRRRYTGWGRLSRKLINGIRDKQSGKTILDF | |
| | LKSDGFANRNFMQLIHDDSLTFKEDIQKAQVSGQGDSLHEHIANLAGSPAIKKGILQ | |
| | TVKVVDELVKVMGRHKPENIVIEMARENQTTQKGQKNSRERMKRIEEGIKELGSQI | |
| | LKEHPVENTQLQNEKLYLYYLQNGRDMYVDQELDINRLSDYDVDHIVPQSFLKDD | |
| | SIDNKVLTRSDKNAGKSDNVPSEEVVKKMKNYWRQLLNAKLITQRKFDNLTKAER | |
| | GGLSELDKAGFIKRQLVETRQITKHVAQILDSRMNTKYDENDKLIREVKVITLKSKL | |
| | VSDFRKDFQFYKVREINNYHHAHDAYLNAVVGTALIKKYPKLESEFVYGDYKVYD | |
| | VRKMIAKSEQEIGKATAKYFFYSNIMNFFKTEITLANGEIRKRPLIETNGETGEIVWD | |
| | KGRDFATVRKVLSMPQVNIVKKTEVQTGGFSKESILPKRNSDKLIARKKDWDPKK | |
| | YGGFDSPTVAYSVLVVAKVEKGKSKKLKSVKELLGITIMERSSFEKNPIDFLEAKG | |
| | YKEVKKDLIIKLPKYSLFELENGRKRMLASAGELQKGNELALPSKYVNFLYLASHY | |
| | EKLKGSPEDNEQKQLFVEQHKHYLDEIIEQISEFSKRVILADANLDKVLSAYNKHRD | |
| | KPIREQAENIIHLFILTNLGAPAAFKYFDTTIDRKRYTSTKEVLDATLIHQSITGLYET | |
| | RIDLSQLGGD | |

[0363] In some embodiments, the N-terminal methionine is removed from a Cas9 nickase, or from any Cas9 variant, ortholog, or equivalent disclosed or contemplated herein. For example, methionine-minus Cas9 nickases include the following sequences, or a variant thereof having an amino acid sequence that has at least 80%, at least 85%, at least 90%, at least 95%, or at least 99% sequence identity thereto.

| Description | Sequence |
|---|---|
| Cas9 nickase | DKKYSIGLDIGTNSVGWAVITDEYKVPSKKFKVLGNTDRHSIKKNLIGALLFDSGETAEAT |
| (Met minus) | RLKRTARRRYTRRKNRICYLQEIFSNEMAKVDDSFFHRLEESFLVEEDKKHERHPIFGNIV |
| Streptococcus | DEVAYHEKYPTIYHLRKKLVDSTDKADLRLIYLALAHMIKFRGHFLIEGDLNPDNSDVDK |
| pyogenes | LFIQLVQTYNQLFEENPINASGVDAKAILSARLSKSRRLENLIAQLPGEKKNGLFGNLIALS |
| Q99ZW2 Cas9 | LGLTPNFKSNFDLAEDAKLQLSKDTYDDDLDNLLAQIGDQYADLFLAAKNLSDAILLSDI |
| with H840X, | LRVNTEITKAPLSASMIKRYDEHHQDLTLLKALVRQQLPEKYKEIFFDQSKNGYAGYIDG |
| wherein X is any | GASQEEFYKFIKPILEKMDGTEELLVKLNREDLLRKQRTFDNGSIPHQIHLGELHAILRRQE |
| alternate amino | DFYPFLKDNREKIEKILTFRIPYYVGPLARGNSRFAWMTRKSEETITPWNFEEVVDKGASA |
| acid | QSFIERMTNFDKNLPNEKVLPKHSLLYEYFTVYNELTKVKYVTEGMRKPAFLSGEQKKAI |
| | VDLLFKTNRKVTVKQLKEDYFKKIECFDSVEISGVEDRFNASLGTYHDLLKIIKDKDELDN |
| | EENEDILEDIVLTLTLFEDREMIEERLKTYAHLFDDKVMKQLKRRRYTGWGRLSRKLINGI |
| | RDKQSGKTILDFLKSDGFANRNEMQLIHDDSLTFKEDIQKAQVSGQGDSLHEHIANLAGS |
| | PAIKKGILQTVKVVDELVKVMGRHKPENIVIEMARENQTTQKGQKNSRERMKRIEEGIKE |
| | LGSQILKEHPVENTQLQNEKLYLYYLQNGRDMYVDQELDINRLSDYDVDXIVPQSFLKD |
| | DSIDNKVLTRSDKNRGKSDNVPSEEVVKKMKNYWRQLLNAKLITQRKFDNLTKAERGG |
| | LSELDKAGFIKRQLVETRQITKHVAQILDSRMNTKYDENDKLIREVKVITLKSKLVSDFRK |
| | DFQFYKVREINNYHHAHDAYLNAVVGTALIKKYPKLESEFVYGDYKVYDVRKMIAKSE |
| | QEIGKATAKYFFYSNIMNFFKTEITLANGEIRKRPLIETNGETGEIVWDKGRDFATVRKVL |
| | SMPQVNIVKKTEVQTGGFSKESILPKRNSDKLIARKKDWDPKKYGGEDSPTVAYSVLVVA |
| | KVEKGKSKKLKSVKELLGITIMERSSFEKNPIDFLEAKGYKEVKKDLIIKLPKYSLFELENG |
| | RKRMLASAGELQKGNELALPSKYVNFLYLASHYEKLKGSPEDNEQKQLFVEQHKHYLDE |
| | IIEQISEFSKRVILADANLDKVLSAYNKHRDKPIREQAENIIHLFILTNLGAPAAFKYFDTTI |
| | DRKRYTSTKEVLDATLIHQSITGLYETRIDLSQLGGD (SEQ ID NO: 36) |
| Cas9 nickase | DKKYSIGLDIGTNSVGWAVITDEYKVPSKKFKVLGNTDRHSIKKNLIGALLEDSGETAEAT |
| (Met minus) | RLKRTARRRYTRRKNRICYLQEIFSNEMAKVDDSFFHRLEESELVEEDKKHERHPIFGNIV |
| Streptococcus | DEVAYHEKYPTIYHLRKKLVDSTDKADLRLIYLALAHMIKFRGHFLIEGDLNPDNSDVDK |
| pyogenes | LFIQLVQTYNQLFEENPINASGVDAKAILSARLSKSRRLENLIAQLPGEKKNGLFGNLIALS |
| Q99ZW2 Cas9 | LGLTPNFKSNFDLAEDAKLQLSKDTYDDDLDNLLAQIGDQYADLFLAAKNLSDAILLSDI |
| with H840A | LRVNTEITKAPLSASMIKRYDEHHQDLTLLKALVRQQLPEKYKEIFFDQSKNGYAGYIDG |
| | GASQEEFYKFIKPILEKMDGTEELLVKLNREDLLRKQRTFDNGSIPHQIHLGELHAILRRQE |
| | DFYPFLKDNREKIEKILTFRIPYYVGPLARGNSRFAWMTRKSEETITPWNFEEVVDKGASA |
| | QSFIERMTNFDKNLPNEKVLPKHSLLYEYFTVYNELTKVKYVTEGMRKPAFLSGEQKKAI |
| | VDLLFKTNRKVTVKQLKEDYFKKIECFDSVEISGVEDRENASLGTYHDLLKIIKDKDFLDN |
| | EENEDILEDIVLTLTLFEDREMIEERLKTYAHLEDDKVMKQLKRRRYTGWGRLSRKLINGI |
| | RDKQSGKTILDFLKSDGFANRNFMQLIHDDSLTFKEDIQKAQVSGQGDSLHEHIANLAGS |
| | PAIKKGILQTVKVVDELVKVMGRHKPENIVIEMARENQTTQKGQKNSRERMKRIEEGIKE |
| | LGSQILKEHPVENTQLQNEKLYLYYLQNGRDMYVDQELDINRLSDYDVDAIVPQSFLKD |
| | DSIDNKVLTRSDKNRGKSDNVPSEEVVKKMKNYWRQLLNAKLITQRKFDNLTKAERGG |
| | LSELDKAGFIKRQLVETRQITKHVAQILDSRMNTKYDENDKLIREVKVITLKSKLVSDFRK |
| | DFQFYKVREINNYHHAHDAYLNAVVGTALIKKYPKLESEFVYGDYKVYDVRKMIAKSE |
| | QEIGKATAKYFFYSNIMNFFKTEITLANGEIRKRPLIETNGETGEIVWDKGRDFATVRKVL |
| | SMPQVNIVKKTEVQTGGFSKESILPKRNSDKLIARKKDWDPKKYGGFDSPTVAYSVLVVA |
| | KVEKGKSKKLKSVKELLGITIMERSSFEKNPIDFLEAKGYKEVKKDLIIKLPKYSLFELENG |
| | RKRMLASAGELQKGNELALPSKYVNFLYLASHYEKLKGSPEDNEQKQLFVEQHKHYLDE |
| | HIEQISEFSKRVILADANLDKVLSAYNKHRDKPIREQAENIIHLFTLTNLGAPAAFKYFDTTI |
| | DRKRYTSTKEVLDATLIHQSITGLYETRIDLSQLGGD (SEQ ID NO: 37) |
| Cas9 nickase | DKKYSIGLDIGTNSVGWAVITDEYKVPSKKFKVLGNTDRHSIKKNLIGALLEDSGETAEAT |
| (Met minus) | RLKRTARRRYTRRKNRICYLQEIFSNEMAKVDDSFFHRLEESFLVEEDKKHERHPIFGNIV |
| Streptococcus | DEVAYHEKYPTIYHLRKKLVDSTDKADLRLIYLALAHMIKFRGHFLIEGDLNPDNSDVDK |
| pyogenes | LFIQLVQTYNQLFEENPINASGVDAKAILSARLSKSRRLENLIAQLPGEKKNGLFGNLIALS |
| Q99ZW2 Cas9 | LGLTPNFKSNEDLAEDAKLQLSKDTYDDDLDNLLAQIGDQYADLFLAAKNLSDAILLSDI |
| with R863X, | LRVNTEITKAPLSASMIKRYDEHHQDLTLLKALVRQQLPEKYKEIFFDQSKNGYAGYIDG |
| wherein X is any | GASQEEFYKFIKPILEKMDGTEELLVKLNREDLLRKQRTFDNGSIPHQIHLGELHAILRRQE |
| alternate amino | DFYPFLKDNREKIEKILTFRIPYYVGPLARGNSRFAWMTRKSEETITPWNFEEVVDKGASA |
| acid | QSFIERMTNFDKNLPNEKVLPKHSLLYEYFTVYNELTKVKYVTEGMRKPAFLSGEQKKAI |
| | VDLLFKTNRKVTVKQLKEDYFKKIECFDSVEISGVEDRENASLGTYHDLLKIIKDKDFLDN |
| | EENEDILEDIVLTLTLFEDREMIEERLKTYAHLFDDKVMKQLKRRRYTGWGRLSRKLINGI |
| | RDKQSGKTILDFLKSDGFANRNFMQLIHDDSLTFKEDIQKAQVSGQGDSLHEHIANLAGS |
| | PAIKKGILQTVKVVDELVKVMGRHKPENIVIEMARENQTTQKGQKNSRERMKRIEEGIKE |
| | LGSQILKEHPVENTQLQNEKLYLYYLQNGRDMYVDQELDINRLSDYDVDHIVPQSFLKD |
| | DSIDNKVLTRSDKNXGKSDNVPSEEVVKKMKNYWRQLLNAKLITQRKFDNLTKAERGG |
| | LSELDKAGFIKRQLVETRQITKHVAQILDSRMNTKYDENDKLIREVKVITLKSKLVSDFRK |
| | DFQFYKVREINNYHHAHDAYLNAVVGTALIKKYPKLESEFVYGDYKVYDVRKMIAKSE |
| | QEIGKATAKYFFYSNIMNFFKTEITLANGEIRKRPLIETNGETGEIVWDKGRDFATVRKVL |
| | SMPQVNIVKKTEVQTGGFSKESILPKRNSDKLIARKKDWDPKKYGGFDSPTVAYSVLVVA |
| | KVEKGKSKKLKSVKELLGITIMERSSFEKNPIDFLEAKGYKEVKKDLIIKLPKYSLFELENG |
| | RKRMLASAGELQKGNELALPSKYVNFLYLASHYEKLKGSPEDNEQKQLFVEQHKHYLDE |
| | HIEQISEFSKRVILADANLDKVLSAYNKHRDKPIREQAENIIHLFTLTNLGAPAAFKYFDTTI |
| | DRKRYTSTKEVLDATLIHQSITGLYETRIDLSQLGGD(SEQ ID NO: 38) |
| Cas9 nickase | DKKYSIGLDIGTNSVGWAVITDEYKVPSKKFKVLGNTDRHSIKKNLIGALLEDSGETAEAT |
| (Met minus) | RLKRTARRRYTRRKNRICYLQEIFSNEMAKVDDSFFHRLEESFLVEEDKKHERHPIFGNIV |
| Streptococcus | DEVAYHEKYPTIYHLRKKLVDSTDKADLRLIYLALAHMIKFRGHFLIEGDLNPDNSDVDK |
| pyogenes | LFIQLVQTYNQLFEENPINASGVDAKAILSARLSKSRRLENLIAQLPGEKKNGLFGNLIALS |
| Q99ZW2 Cas9 | LGLTPNFKSNFDLAEDAKLQLSKDTYDDDLDNLLAQIGDQYADLFLAAKNLSDAILLSDI |
| with R863A | LRVNTEITKAPLSASMIKRYDEHHQDLTLLKALVRQQLPEKYKEIFFDQSKNGYAGYIDG |
| | GASQEEFYKFIKPILEKMDGTEELLVKLNREDLLRKQRTFDNGSIPHQIHLGELHAILRRQE |
| | DFYPFLKDNREKIEKILTFRIPYYVGPLARGNSRFAWMTRKSEETITPWNFEEVVDKGASA |
| | QSFIERMTNFDKNLPNEKVLPKHSLLYEYFTVYNELTKVKYVTEGMRKPAFLSGEQKKAI |
| | VDLLFKTNRKVTVKQLKEDYFKKIECFDSVEISGVEDRENASLGTYHDLLKIIKDKDFLDN |
| | EENEDILEDIVLTLTLFEDREMIEERLKTYAHLEDDKVMKQLKRRRYTGWGRLSRKLINGI |
| | RDKQSGKTILDFLKSDGFANRNFMQLIHDDSLTFKEDIQKAQVSGQGDSLHEHIANLAGS |
| | PAIKKGILQTVKVVDELVKVMGRHKPENIVIEMARENQTTQKGQKNSRERMKRIEEGIKE |
| | LGSQILKEHPVENTQLQNEKLYLYYLQNGRDMYVDQELDINRLSDYDVDHIVPQSFLKD |
| | DSIDNKVLTRSDKNAGKSDNVPSEEVVKKMKNYWRQLLNAKLITQRKFDNLTKAERGG |
| | LSELDKAGFIKRQLVETRQITKHVAQILDSRMNTKYDENDKLIREVKVITLKSKLVSDFRK |
| | DFQFYKVREINNYHHAHDAYLNAVVGTALIKKYPKLESEFVYGDYKVYDVRKMIAKSE |
| | QEIGKATAKYFFYSNIMNFFKTEITLANGEIRKRPLIETNGETGEIVWDKGRDFATVRKVL |
| | SMPQVNIVKKTEVQTGGFSKESILPKRNSDKLIARKKDWDPKKYGGFDSPTVAYSVLVVA |
| | KVEKGKSKKLKSVKELLGITIMERSSFEKNPIDFLEAKGYKEVKKDLIIKLPKYSLFELENG |
| | RKRMLASAGELQKGNELALPSKYVNFLYLASHYEKLKGSPEDNEQKQLFVEQHKHYLDE |
| | IIEQISEFSKRVILADANLDKVLSAYNKHRDKPIREQAENIIHLFTLTNLGAPAAFKYFDTTI |
| | DRKRYTSTKEVLDATLIHQSITGLYETRIDLSQLGGD (SEQ ID NO: 39) |

### E. Uther Cas9 Variants

[0364] Besides dead Cas9 and Cas9 nickase variants, the Cas9 proteins used herein may also include other “Cas9 variants” having at least about 70% identical, at least about 80% identical, at least about 90% identical, at least about 95% identical, at least about 96% identical, at least about 97% identical, at least about 98% identical, at least about 99% identical, at least about 99.5% identical, or at least about 99.9% identical to any reference Cas9 protein, including any wild type Cas9, or mutant Cas9 (e.g., a dead Cas9 or Cas9 nickase), or fragment Cas9, or circular permutant Cas9, or other variant of Cas9 disclosed herein or known in the art. In some embodiments, a Cas9 variant may have 1, 2, 3, 4, 5, 6, 7, 8, 9, 10, 11, 12, 13, 14, 15, 16, 17, 18, 19, 20, 21, 22, 21, 24, 25, 26, 27, 28, 29, 30, 31, 32, 33, 34, 35, 36, 37, 38, 39, 40, 41, 42.43, 44, 45, 46, 47, 48, 49, 50 or more amino acid changes compared to a reference Cas9. In some embodiments, the Cas9 variant comprises a fragment of a reference Cas9 (e.g., a gRNA binding domain or a DNA-cleavage domain), such that the fragment is at least about 70% identical, at least about 80% identical, at least about 90% identical, at least about 95% identical, at least about 96% identical, at least about 97% identical, at least about 98% identical, at least about 99% identical, at least about 99.5% identical, or at least about 99.9% identical to the corresponding fragment of wild type Cas9. In some embodiments, the fragment is at least 30%, at least 35%, at least 40%, at least 45%, at least 50%, at least 55%, at least 60%, at least 65%, at least 70%, at least 75%, at least 80%, at least 85%, at least 90%, at least 95% identical, at least 96%, at least 97%, at least 98%, at least 99%, or at least 99.5% of the amino acid length of a corresponding wild type Cas9 (e.g., SEQ ID NO: 2).

[0365] In some embodiments, the disclosure also may utilize Cas9 fragments that retain their functionality and that are fragments of any herein disclosed Cas9 protein. In some embodiments, the Cas9 fragment is at least 100 amino acids in length. In some embodiments, the fragment is at least 100, 150, 200, 250, 300, 350, 400, 450, 500, 550, 600, 650, 700, 750, 800, 850, 900, 950, 1000, 1050, 1100, 1150, 1200, 1250, or at least 1300 amino acids in length.

[0366] In various embodiments, the prime editors utilized in the methods and compositions disclosed herein may comprise one of the Cas9 variants described as follows, or a Cas9 variant thereof having at least about 70% identical, at least about 80% identical, at least about 90% identical, at least about 95% identical, at least about 96% identical, at least about 97% identical, at least about 98% identical, at least about 99% identical, at least about 99.5% identical, or at least about 99.9% identical to any reference Cas9 variants.

### F. Small-Sized Cas9 Variants

[0367] In some embodiments, the prime editors utilized in the methods and compositions contemplated herein can include a Cas9 protein that is of smaller molecular weight than the canonical SpCas9 sequence. In some embodiments, the smaller-sized Cas9 variants may facilitate delivery to cells, e.g., by an expression vector, nanoparticle, or other means of delivery. In certain embodiments, the smaller-sized Cas9 variants can include enzymes categorized as type II enzymes of the Class 2 CRISPR-Cas systems. In some embodiments, the smaller-sized Cas9 variants can include enzymes categorized as type V enzymes of the Class 2 CRISPR-Cas systems. In other embodiments, the smaller-sized Cas9 variants can include enzymes categorized as type VI enzymes of the Class 2 CRISPR-Cas systems.

[0368] The canonical SpCas9 protein is 1368 amino acids in length and has a predicted molecular weight of 158 kilodaltons. The term “small-sized Cas9 variant”, as used herein, refers to any Cas9 variant—naturally occurring, engineered, or otherwise—that is less than at least 1300 amino acids, or at least less than 1290 amino acids, or than less than 1280 amino acids, or less than 1270 amino acid, or less than 1260 amino acid, or less than 1250 amino acids, or less than 1240 amino acids, or less than 1230 amino acids, or less than 1220 amino acids, or less than 1210 amino acids, or less than 1200 amino acids, or less than 1190 amino acids, or less than 1180 amino acids, or less than 1170 amino acids, or less than 1160 amino acids, or less than 1150 amino acids, or less than 1 140 amino acids, or less than 1130 amino acids, or less than 1120 amino acids, or less than 1110 amino acids, or less than 1100 amino acids, or less than 1050 amino acids, or less than 1000 amino acids, or less than 950 amino acids, or less than 900 amino acids, or less than 850 amino acids, or less than 800 amino acids, or less than 750 amino acids, or less than 700 amino acids, or less than 650 amino acids, or less than 600 amino acids, or less than 550 amino acids, or less than 500 amino acids, but at least larger than about 400 amino acids and retaining the required functions of the Cas9 protein. The Cas9 variants can include those categorized as type II, type V, or type VI enzymes of the Class 2 CRISPR-Cas system.

[0369] In various embodiments, the prime editors utilized in the methods and compositions disclosed herein may comprise one of the small-sized Cas9 variants described as follows, or a Cas9 variant thereof having at least about 70% identical, at least about 80% identical, at least about 90% identical, at least about 95% identical, at least about 96% identical, at least about 97% identical, at least about 98% identical, at least about 99% identical, at least about 99.5% identical, or at least about 99.9% identical to any reference small-sized Cas9 protein.

| | | SEQ |
|---|---|---|
| Description | Sequence | ID NO: |
| SaCas9 | MGKRNYILGLDIGITSVGYGIIDYETRDVIDAGVRLFKEANVENNEGRRSKRGARR | 10 |
| Staphylococcus | LKRRRRHRIQRVKKLLFDYNLLTDHSELSGINPYEARVKGLSQKLSEEEFSAALLHL | |
| aureus | AKRRGVHNVNEVEEDTGNELSTKEQISRNSKALEEKYVAELQLERLKKDGEVRGSI | |
| 1053 AA | NRFKTSDYVKEAKQLLKVQKAYHQLDQSFIDTYIDLLETRRTYYEGPGEGSPFGW | |
| 123 kDa | KDIKEWYEMLMGHCTYFPEELRSVKYAYNADLYNALNDLNNLVITRDENEKLEY | |
| | YEKFQIIENVFKQKKKPTLKQIAKEILVNEEDIKGYRVTSTGKPEFTNLKVYHDIKDI | |
| | TARKEIIENAELLDQIAKILTIYQSSEDIQEELTNLNSELTQEEIEQISNLKGYTGTHNL | |
| | SLKAINLILDELWHTNDNQIAIFNRLKLVPKKVDLSQQKEIPTTLVDDFILSPVVKRS | |
| | FIQSIKVINAIIKKYGLPNDIIIELAREKNSKDAQKMINEMQKRNRQTNERIEEIIRTTG | |
| | KENAKYLIEKIKLHDMQEGKCLYSLEAIPLEDLLNNPFNYEVDHIIPRSVSFDNSENN | |
| | KVLVKQEENSKKGNRTPFQYLSSSDSKISYETFKKHILNLAKGKGRISKTKKEYLLE | |
| | ERDINRFSVQKDFINRNLVDTRYATRGLMNLLRSYFRVNNLDVKVKSINGGFTSEL | |
| | RRKWKFKKERNKGYKHHAEDALIIANADFIFKEWKKLDKAKKVMENQMFEEKQA | |
| | ESMPEIETEQEYKEIFITPHQIKHIKDFKDYKYSHRVDKKPNRKLINDTLYSTRKDDK | |
| | GNTLIVNNLNGLYDKDNDKLKKLINKSPEKLLMYHHDPQTYQKLKLIMEQYGDEK | |
| | NPLYKYYEETGNYLTKYSKKDNGPVIKKIKYYGNKLNAHLDITDDYPNSRNKVVK | |
| | LSLKPYRFDVYLDNGVYKFVTVKNLDVIKKENYYEVNSKCYEEAKKLKKISNQAE | |
| | FIASFYKNDLIKINGELYRVIGVNNDLLNRIEVNMIDITYREYLENMNDKRPPHIIKTI | |
| | ASKTQSIKKYSTDILGNLYEVKSKKHPQIIKK | |
| NmeCas9 | MAAFKPNSINYILGLDIGIASVGWAMVEIDEEENPIRLIDLGVRVFERAEVPKTGDSL | 40 |
| N. meningitidis | AMARRLARSVRRLTRRRAHRLLRTRRLLKREGVLQAANFDENGLIKSLPNTPWQL | |
| 1083 AA | RAAALDRKLTPLEWSAVLLHLIKHRGYLSQRKNEGETADKELGALLKGVAGNAH | |
| 124.5 kDa | ALQTGDFRTPAELALNKFEKESGHIRNQRSDYSHTFSRKDLQAELILLFEKQKEFGN | |
| | PHVSGGLKEGIETLLMTQRPALSGDAVQKMLGHCTFEPAEPKAAKNTYTAERFIW | |
| | LTKLNNLRILEQGSERPLTDTERATLMDEPYRKSKLTYAQARKLLGLEDTAFFKGL | |
| | RYGKDNAEASTLMEMKAYHAISRALEKEGLKDKKSPLNLSPELQDEIGTAFSLEKT | |
| | DEDITGRLKDRIQPEILEALLKHISFDKFVQISLKALRRIVPLMEQGKRYDEACABIY | |
| | GDHYGKKNTEEKIYLPPIPADEIRNPVVLRALSQARKVINGVVRRYGSPARIHIETA | |
| | REVGKSFKDRKEIEKRQEENRKDREKAAAKFREYFPNFVGEPKSKDILKLRLYEQQ | |
| | HGKCLYSGKEINLGRLNEKGYVEIDAALPFSRTWDDSFNNKVLVLGSENQNKGNQ | |
| | TPYEYFNGKDNSREWQEFKARVETSRFPRSKKQRILLQKFDEDGFKERNLNDTRYV | |
| | NRFLCQFVADRMRLTGKGKKRVFASNGQITNLLRGFWGLRKVRAENDRHHALDA | |
| | VVVACSTVAMQQKITRFVRYKEMNAFDGKTIDKETGEVLHQKTHFPQPWEFFAQE | |
| | VMIRVFGKPDGKPEFEEADTLEKLRTLLAEKLSSRPEAVHEYVTPLFVSRAPNRKM | |
| | SGQGHMETVKSAKRLDEGVSVLRVPLTQLKLKDLEKMVNREREPKLYEALKARL | |
| | EAHKDDPAKAFAEPFYKYDKAGNRTQQVKAVRVEQVQKTGVWVRNHNGIADNA | |
| | TMVRVDVFEKGDKYYLVPIYSWQVAKGILPDRAVVQGKDEEDWQLIDDSENFKFS | |
| | LHPNDLVEVITKKARMFGYFASCHRGTGNINIRIHDLDHKIGKNGILEGIGVKTALS | |
| | FQKYQIDELGKEIRPCRLKKRPPVR | |
| CjCas9 | MARILAFDIGISSIGWAFSENDELKDCGVRIFTKVENPKTGESLALPRRLARSARKRL | 41 |
| C. jejuni | ARRKARLNHLKHLIANEFKLNYEDYQSFDESLAKAYKGSLISPYELRFRALNELLS | |
| 984 AA | KQDFARVILHIAKRRGYDDIKNSDDKEKGAILKAIKQNEEKLANYQSVGEYLYKEY | |
| 114.9 kDa | FQKFKENSKEFTNVRNKKESYERCIAQSFLKDELKLIFKKQREFGFSFSKKFEEEVLS | |
| | VAFYKRALKDESHLVGNCSFFTDEKRAPKNSPLAFMFVALTRIINLLNNLKNTEGIL | |
| | YTKDDLNALLNEVLKNGTLTYKQTKKLLGLSDDYEFKGEKGTYFIEFKKYKEFIKA | |
| | LGEHNLSQDDLNEIAKDITLIKDEIKLKKALAKYDLNQNQIDSLSKLEFKDHLNISFK | |
| | ALKLVTPLMLEGKKYDEACNELNLKVAINEDKKDFLPAFNETYYKDEVTNPVVLR | |
| | AIKEYRKVLNALLKKYGKVHKINIELAREVGKNHSQRAKIEKEQNENYKAKKDAE | |
| | LECEKLGLKINSKNILKLRLFKEQKEFCAYSGEKIKISDLQDEKMLEIDHIYPYSRSF | |
| | DDSYMNKVLVFTKQNQEKLNQTPFEAFGNDSAKWQKIEVLAKNLPTKKQKRILDK | |
| | NYKDKEQKNFKDRNLNDTRYIARLVLNYTKDYLDFLPLSDDENTKLNDTQKGSKV | |
| | HVEAKSGMLTSALRHTWGFSAKDRNNHLHHAIDAVIIAYANNSIVKAFSDFKKEQ | |
| | ESNSAELYAKKISELDYKNKRKFFEPFSGFRQKVLDKIDEIFVSKPERKKPSGALHEE | |
| | TFRKEEEFYQSYGGKEGVLKALELGKIRKVNGKIVKNGDMFRVDIFKHKKTNKFY | |
| | AVPIYTMDFALKVLPNKAVARSKKGEIKDWILMDENYEFCFSLYKDSLILIQTKDM | |
| | QEPEFVYYNAFTSSTVSLIVSKHDNKFETLSKNQKILFKNANEKEVIAKSIGIQNLKV | |
| | FEKYIVSALGEVTKAEFRQREDFKK | |
| GeoCas9 | MRYKIGLDIGITSVGWAVMNLDIPRIEDLGVRIFDRAENPQTGESLALPRRLARSAR | 42 |
| G. | RRLRRRKHRLERIRRLVIREGILTKEELDKLFEEKHEIDVWQLRVEALDRKLNNDEL | |
| stearothermophilus | ARVLLHLAKRRGFKSNRKSERSNKENSTMLKHIEENRAILSSYRTVGEMIVKDPKF | |
| 1087 AA | ALHKRNKGENYTNTIARDDLEREIRLIFSKQREFGNMSCTEEFENEYITIWASQRPV | |
| 127 kDa | ASKDDIEKKVGFCTFEPKEKRAPKATYTFQSFIAWEHINKLRLISPSGARGLTDEER | |
| | RLLYEQAFQKNKITYHDIRTLLHLPDDTYFKGIVYDRGESRKQNENIRFLELDAYH | |
| | QIRKAVDKVYGKGKSSSFLPIDFDTFGYALTLFKDDADIHSYLRNEYEQNGKRMPN | |
| | LANKVYDNELIEELLNLSFTKFGHLSLKALRSILPYMEQGEVYSSACERAGYTFTGP | |
| | KKKQKTMLLPNIPPIANPVVMRALTQARKVVNAIIKKYGSPVSIHIELARDLSQTFD | |
| | ERRKTKKEQDENRKKNETAIRQLMEYGLTLNPTGHDIVKFKLWSEQNGRCAYSLQ | |
| | PIEIERLLEPGYVEVDHVIPYSRSLDDSYTNKVLVLTRENREKGNRIPAEYLGVGTE | |
| | RWQQFETFVLTNKQFSKKKRDRLLRLHYDENEETEFKNRNLNDTRYISRFFANFIR | |
| | EHLKFAESDDKQKVYTVNGRVTAHLRSRWEFNKNREESDLHHAVDAVIVACTTPS | |
| | DIAKVTAFYQRREQNKELAKKTEPHFPQPWPHFADELRARLSKHPKESIKALNLGN | |
| | YDDQKLESLQPVFVSRMPKRSVTGAAHQETLRRYVGIDERSGKIQTVVKTKLSEIK | |
| | LDASGHFPMYGKESDPRTYEAIRQRLLEHNNDPKKAFQEPLYKPKKNGEPGPVIRT | |
| | VKIIDTKNQVIPLNDGKTVAYNSNIVRVDVFEKDGKYYCVPVYTMDIMKGILPNKÅ | |
| | IEPNKPYSEWKEMTEDYTFRFSLYPNDLIRIELPREKTVKTAAGEEINVKDVFVYYK | |
| | TIDSANGGLELISHDHRFSLRGVGSRTLKRFEKYQVDVLGNIYKVRGEKRVGLASS | |
| | AHSKPGKTIRPLQSTRD | |
| LbaCas12a | MSKLEKFTNCYSLSKTLRFKAIPVGKTQENIDNKRLLVEDEKRAEDYKGVKKLLDR | 43 |
| L. bacterium | YYLSFINDVLHSIKLKNLNNYISLFRKKTRTEKENKELENLEINLRKEIAKAFKGNEG | |
| 1228 AA | YKSLFKKDIIETILPEFLDDKDEIALVNSENGFTTAFTGFFDNRENMFSEEAKSTSIAF | |
| 143,9 kDa | RCINENLTRYISNMDIFEKVDAIFDKHEVQEIKEKILNSDYDVEDFFEGEFFNFVLTQ | |
| | EGIDVYNAHIGGFVTESGEKIKGLNEYINLYNQKTKQKLPKFKPLYKQVLSDRESLS | |
| | FYGEGYTSDEEVLEVFRNTLNKNSEIFSSIKKLEKLFKNFDEYSSAGIFVKNGPAISTI | |
| | SKDIFGEWNVIRDKWNAEYDDIHLKKKAVVTEKYEDDRRKSFKKIGSFSLEQLQEY | |
| | ADADLSVVEKLKEIIIQKVDEIYKVYGSSEKLFDADFVLEKSLKKNDAVVAIMKDL | |
| | LDSVKSFENYIKAFFGEGKETNRDESFYGDFVLAYDILLKVDHIYDAIRNYVTQKPY | |
| | SKDKFKLYFQNPQFMGGWDKDKETDYRATILRYGSKYYLAIMDKKYAKCLQKID | |
| | KDDVNGNYEKINYKLLPGPNKMLPKVFFSKKWMAYYNPSEDIQKIYKNGTFKKG | |
| | DMENLNDCHKLIDFFKDSISRYPKWSNAYDFNFSETEKYKDIAGFYREVEEQGYKV | |
| | SFESASKKEVDKLVEEGKLYMFQIYNKDFSDKSHGTPNLHTMYFKLLFDENNHGQI | |
| | RLSGGAELFMRRASLKKEELVVHPANSPIANKNPDNPKKTTTLSYDVYKDKRFSED | |
| | QYELHIPIAINKCPKNIFKINTEVRVLLKHDDNPYVIGIDRGERNLLYIVVVDGKGNI | |
| | VEQYSLNEIINNENGIRIKTDYHSLLDKKEKERFEARQNWTSIENIKELKAGYISQVV | |
| | HKICELVEKYDAVIALEDLNSGFKNSRVKVEKQVYQKFEKMLIDKLNYMVDKKSN | |
| | PCATGGALKGYQITNKFESFKSMSTQNGFIFYIPAWLTSKIDPSTGFVNLLKTKYTSI | |
| | ADSKKFISSFDRIMYVPEEDLFEFALDYKNFSRTDADYIKKWKLYSYGNRIRIFRNP | |
| | KKNNVFDWEEVCLTSAYKELFNKYGINYQQGDIRALLCEQSDKAFYSSFMALMSL | |
| | MLQMRNSITGRTDVDFLISPVKNSDGIFYDSRNYEAQENAILPKNADANGAYNIAR | |
| | KVLWAIGQFKKAEDEKLDKVKIAISNKEWLEYAQTSVKH | |
| BhCas12b | MATRSFILKIEPNEEVKKGLWKTHEVLNHGIAYYMNILKLIRQEAIYEHHEQDPKNP | 44 |
| B. hisashii | KKVSKAEIQAELWDFVLKMQKCNSFTHEVDKDEVFNILRELYEELVPSSVEKKGE | |
| 1108 AA | ANQLSNKFLYPLVDPNSQSGKGTASSGRKPRWYNIKIAGDPSWEEEKKKWEEDK | |
| 130.4 kDa | KKDPLAKILGKLAEYGLIPLFIPYTDSNEPIVKEIKWMEKSRNQSVRRLDKDMFIQA | |
| | LERFLSWESWNLKVKEEYEKVEKEYKTLEERIKEDIQALKALEQYEKERQEQLLRD | |
| | TLNTNEYRLSKRGLRGWREIIQKWLKMDENEPSEKYLEVFKDYQRKHPREAGDYS | |
| | VYEFLSKKENHFIWRNHPEYPYLYATFCEIDKKKKDAKQQATFTLADPINHPLWVR | |
| | FEERSGSNLNKYRILTEQLHTEKLKKKLTVQLDRLIYPTESGGWEEKGKVDIVLLPS | |
| | RQFYNQIFLDIEEKGKHAFTYKDESIKFPLKGTLGGARVQFDRDHLRRYPHKVESG | |
| | NVGRIYFNMTVNIEPTESPVSKSLKIHRDDFPKVVNFKPKELTEWIKDSKGKKLKSG | |
| | IESLEIGLRVMSIDLGQRQAAAASIFEVVDQKPDIEGKLFFPIKGTELYAVHRASENI | |
| | KLPGETLVKSREVLRKAREDNLKLMNQKLNFLRNVLHFQQFEDITEREKRVTKWIS | |
| | RQENSDVPLVYQDELIQIRELMYKPYKDWVAFLKQLHKRLEVEIGKEVKHWRKSL | |
| | SDGRKGLYGISLKNIDEIDRTRKFLLRWSLRPTEPGEVRRLEPGQRFAIDQLNHLNA | |
| | LKEDRLKKMANTIIMHALGYCYDVRKKKWQAKNPACQHILFEDLSNYNPYEERSR | |
| | FENSKLMKWSRREIPRQVALQGEIYGLQVGEVGAQFSSRFHAKTGSPGIRCSVVTK | |
| | EKLQDNRFFKNLQREGRLTLDKIAVLKEGDLYPDKGGEKFISLSKDRKCVTTHADI | |
| | NAAQNLQKRFWTRTHGFYKVYCKAYQVDGQTVYIPESKDQKQKITEEFGEGYFIL | |
| | KDGVYEWVNAGKLKIKKGSSKQSSSELVDSDILKDSFDLASELKGEKLMLYRDPS | |
| | GNVFPSDKWMAAGVFFGKLERILISKLTNQYSISTIEDDSSKQSM | |

### G. Cas9 Equivalents

[0370] In some embodiments, the prime editors utilized in the methods and compositions described herein can include any Cas9 equivalent. As used herein, the term “Cas9 equivalent” is a broad term that encompasses any napDNAbp protein that serves the same function as Cas9 in the prime editors despite that its amino acid primary sequence and/or its three-dimensional structure may be different and/or unrelated from an evolutionary standpoint. Thus, while Cas9 equivalents include any Cas9 ortholog, homolog, mutant, or variant described or embraced herein that are evolutionarily related, the Cas9 equivalents also embrace proteins that may have evolved through convergent evolution processes to have the same or similar function as Cas9, but that do not necessarily have any similarity with regard to amino acid sequence and/or three-dimensional structure. The prime editors utilized in the methods and compositions described here embrace any Cas9 equivalent that would provide the same or similar function as Cas9 despite that the Cas9 equivalent may be based on a protein that arose through convergent evolution. For instance, if Cas9 refers to a type II enzyme of the CRISPR-Cas system, a Cas9 equivalent can refer to a type V or type VI enzyme of the CRISPR-Cas system.

[0371] For example, Cas12e (CasX) is a Cas9 equivalent that reportedly has the same function as Cas9 but which evolved through convergent evolution. Thus, the Cas12e (CasX) protein described in Liu et al., “CasX enzymes comprises a distinct family of RNA-guided genome editors,” Nature, 2019, Vol. 566: 218-223, is contemplated to be used with the prime editors utilized in the methods and compositions described herein. In addition, any variant or modification of Cas12e (CasX) is conceivable and within the scope of the present disclosure.

[0372] Cas9 is a bacterial enzyme that evolved in a wide variety of species. However, the Cas9 equivalents contemplated herein may also be obtained from archaea, which constitute a domain and kingdom of single-celled prokaryotic microbes different from bacteria. In some embodiments, Cas9 equivalents may refer to Cas12e (CasX) or Cas12d (CasY), which have been described in, for example, Burstein et al., “New CRISPR-Cas systems from uncultivated microbes.” Cell Res. 2017 Feb. 21. doi: 10.1038/cr.2017.21, the entire contents of which is hereby incorporated by reference. Using genome-resolved metagenomics, a number of CRISPR-Cas systems were identified, including the first reported Cas9 in the archaeal domain of life. This divergent Cas9 protein was found in little-studied nanoarchaea as part of an active CRISPR-Cas system. In bacteria, two previously unknown systems were discovered, CRISPR-Cas12e and CRISPR-Cas12d, which are among the most compact systems yet discovered. In some embodiments, Cas9 refers to Cas12e, or a variant of Cas12e. In some embodiments, Cas9 refers to a Cas12d, or a variant of Cas12d. It should be appreciated that other RNA-guided DNA binding proteins may be used as a nucleic acid programmable DNA binding protein (napDNAbp) and are within the scope of this disclosure. Also see Liu et al., “CasX enzymes comprises a distinct family of RNA-guided genome editors,” Nature, 2019, Vol. 566: 218-223. Any of these Cas9 equivalents are contemplated.

[0373] In some embodiments, the Cas9 equivalent comprises an amino acid sequence that is at least 85%, at least 90%, at least 91%, at least 92%, at least 93%, at least 94%, at least 95%, at least 96%, at least 97%, at least 98%, at least 99%, or at least 99.5% identical to a naturally-occurring Cas12e (CasX) or Cas12d (CasY) protein. In some embodiments, the napDNAbp is a naturally-occurring Cas12e (CasX) or Cas12d (CasY) protein. In some embodiments, the napDNAbp comprises an amino acid sequence that is at least 85%, at least 90%, at least 91%, at least 92%, at least 93%, at least 94%, at least 95%, at least 96%, at least 97%, at least 98%, at least 99%, or at least 99.5% identical to a wild-type Cas moiety or any Cas moiety provided herein.

[0374] In various embodiments, the nucleic acid programmable DNA binding proteins include, without limitation, Cas9 (e.g., dCas9 and nCas9), Cas12e (CasX), Cas12d (CasY), Cas12a (Cpf1), Cas12b1 (C2c1), Cas13a (C2c2), Cas12c (C2c3), Argonaute, and Cas12b1. One example of a nucleic acid programmable DNA-binding protein that has different PAM specificity than Cas9 is Clustered Regularly Interspaced Short Palindromic Repeats from Prevotella and Francisella 1 (i.e., Cas12a (Cpf1)). Similar to Cas9, Cas12a (Cpf1) is also a Class 2 CRISPR effector, but it is a member of type V subgroup of enzymes, rather than the type II subgroup. It has been shown that Cas12a (Cpf1) mediates robust DNA interference with features distinct from Cas9, Cas12a (Cpf1) is a single RNA-guided endonuclease lacking tracrRNA, and it utilizes a T-rich protospacer-adjacent motif (TTN, TTTN, or YTN). Moreover, Cpf1 cleaves DNA via a staggered DNA double-stranded break. Out of 16 Cpf1-family proteins, two enzymes from Acidaminococcus and Lachnospiraceae are shown to have efficient genome-editing activity in human cells. Cpf1 proteins are known in the art and have been described previously, for example Yamano et al., “Crystal structure of Cpf1 in complex with guide RNA and target DNA.” Cell (165) 2016, p. 949-962; the entire contents of which is hereby incorporated by reference.

[0375] In still other embodiments, the Cas protein may include any CRISPR associated protein, including but not limited to, Cas12a, Cas12b1, Cas1, Cas1B, Cas2, Cas3, Cas4, Cas5, Cas6, Cas7, Cas8, Cas9 (also known as Csn1 and Csx12), Cas10, Csy1, Csy2, Csy3. Cse1, Cse2, Csc1, Csc2, Csa5, Csn2, Csm2, Csm3, Csm4, Csm5, Csm6, Cmr1, Cmr3, Cmr4, Cmr5, Cmr6, Csb1, Csb2, Csb3, Csx17, Csx14, Csx10, Csx16, CsaX, Csx3, Csx1, Csx15, Csf1, Csf2, Csf3, Csf4, homologs thereof, or modified versions thereof, and preferably comprising a nickase mutation (e.g., a mutation corresponding to the D10A mutation of the wild type Cas9 polypeptide of SEQ ID NO: 2).

[0376] In various other embodiments, the napDNAbp can be any of the following proteins: a Cas9, a Cas12a (Cpf1), a Cas12e (CasX), a Cas12d (CasY), a Cas12b1 (C2c1), a Cas13a (C2c2), a Cas12c (C2c3), a GeoCas9, a CjCas9, a Cas12g. a Cas12h, a Cas12i, a Cas13b, a Cas13c, a Cas 13d, a Cas 14, a Csn2, an xCas9, an SpCas9-NG, a circularly permuted Cas9, or an Argonaute (Ago) domain, or a variant thereof.

[0377] Exemplary Cas9 equivalent protein sequences can include the following:

| Description | Sequence |
|---|---|
| AsCas12a | HAALDQPLPTTLKKQEEKEILKSQLDSLLGLYHLLDWFAVDESNEVDPEFSARLTGIKLEME |
| (previously | MTQFEGFTNLYQVSKTLRFELIPQGKTLKHIQEQGFIEEDKARNDHYKELKPIIDRIYKTYAD |
| known as | QCLQLVQLDWENLSAAIDSYRKEKTEETRNALIEEQATYRNAIHDYFIGRTDNLTDAINKRH |
| Cpf1) | AEIYKGLFKAELFNGKVLKQLGTVTTTEHENALLRSFDKFTTYFSGFYENRKNVFSAEDIST |
| Acidaminococcus | AIPHRIVQDNFPKFKENCHIFTRLITAVPSLREHFENVKKAIGIFVSTSIEEVFSFPFYNQLLTQ |
| sp. (strain | TQIDLYNQLLGGISREAGTEKIKGLNEVLNLAIQKNDETAHIIASLPHRFIPLFKQILSDRNTLS |
| BV316) UniProtKB | FILEEFKSDEEVIQSFCKYKTLLRNENVLETAEALFNELNSIDLTHIFISHKKLETISSALCDHW |
| U2UMQ6 | DTLRNALYERRISELTGKITKSAKEKVQRSLKHEDINLQEIISAAGKELSEAFKQKTSEILSHA |
| | PSLSFYNKARNYATKKPYSVEKFKLNFQMPTLASGWDVNKEKNNGAILFVKNGLYYLGIM |
| | PKQKGRYKALSFEPTEKTSEGFDKMYYDYFPDAAKMIPKCSTQLKAVTAHFQTHTTPILLS |
| | NNFIEPLEITKEIYDLNNPEKEPKKFQTAYAKKTGDQKGYREALCKWIDFTRDFLSKYTKTT |
| | SIDLSSLRPSSQYKDLGEYYAELNPLLYHISFQRIAEKEIMDAVETGKLYLFQIYNKDFAKGH |
| | HGKPNLHTLYWTGLFSPENLAKTSIKLNGQAELFYRPKSRMKRMAHRLGEKMLNKKLKDQ |
| | KTPIPDTLYQELYDYVNHRLSHDLSDEARALLPNVITKEVSHEIIKDRRFTSDKFFFHVPITLN |
| | YQAANSPSKFNQRVNAYLKEHPETPIIGIDRGERNLIYITVIDSTGKILEQRSLNTIQQFDYQK |
| | KLDNREKERVAARQAWSVVGTIKDLKQGYLSQVIHEIVDLMIHYQAVVVLENLNFGFKSK |
| | RTGIAEKAVYQQFEKMLIDKLNCLVLKDYPAEKVGGVLNPYQLTDQFTSFAKMGTQSGFLF |
| | YVPAPYTSKIDPLTGFVDPFVWKTIKNHESRKHFLEGFDFLHYDVKTGDFILHFKMNRNLSF |
| | QRGLPGFMPAWDIVFEKNETQFDAKGTPFIAGKRIVPVIENHRFTGRYRDLYPANELIALLEE |
| | KGIVFRDGSNILPKLLENDDSHAIDTMVALIRSVLQMRNSNAATGEDYINSPVRDLNGVCFD |
| | SRFQNPEWPMDADANGAYHIALKGQLLLNHLKESKDLKLQNGISNQDWLAYIQELRN |
| | (SEQ ID NO: 45) |
| AsCas12a | MTQFEGFTNLYQVSKTLRFELIPQGKTLKHIQEQGFIEEDKARNDHYKELKPIIDRIYKTYAD |
| nickase (e.g., | QCLQLVQLDWENLSAAIDSYRKEKTEETRNALIEEQATYRNAIHDYFIGRTDNLTDAINKRH |
| R1226A) | AEIYKGLFKAELFNGKVLKQLGTVTTTEHENALLRSFDKFTTYFSGFYENRKNVFSAEDIST |
| | AIPHRIVQDNFPKFKENCHIFTRLITAVPSLREHFENVKKAIGIFVSTSIEEVFSFPFYNQLLTQ |
| | TQIDLYNQLLGGISREAGTEKIKGLNEVLNLAIQKNDETAHIIASLPHRFIPLFKQILSDRNTLS |
| | FILEEFKSDEEVIQSFCKYKTLLRNENVLETAEALFNELNSIDLTHIFISHKKLETISSALCDHW |
| | DTLRNALYERRISELTGKITKSAKEKVQRSLKHEDINLQEISAAGKELSEAFKQKTSEILSHA |
| | HAALDQPLPTTLKKQEEKEILKSQLDSLLGLYHLLDWFAVDESNEVDPEFSARLTGIKLEME |
| | PSLSFYNKARNYATKKPYSVEKFKLNFQMPTLASGWDVNKEKNNGAILFVKNGLYYLGIM |
| | PKQKGRYKALSFEPTEKTSEGFDKMYYDYFPDAAKMIPKCSTQLKAVTAHFQTHTTPILLS |
| | NNFIEPLEITKEIYDLNNPEKEPKKFQTAYAKKTGDQKGYREALCKWIDFTRDFLSKYTKTT |
| | SIDLSSLRPSSQYKDLGEYYAELNPLLYHISFQRIAEKEIMDAVETGKLYLFQIYNKDFAKGH |
| | HGKPNLHTLYWTGLFSPENLAKTSIKLNGQAELFYRPKSRMKRMAHRLGEKMLNKKLKDQ |
| | KTPIPDTLYQELYDYVNHRLSHDLSDEARALLPNVITKEVSHEIIKDRRFTSDKFFFHVPITLN |
| | YQAANSPSKFNQRVNAYLKEHPETPIIGIDRGERNLIYITVIDSTGKILEQRSLNTIQQFDYQK |
| | KLDNREKERVAARQAWSVVGTIKDLKQGYLSQVIHEIVDLMIHYQAVVVLENLNFGFKSK |
| | RTGIAEKAVYQQFEKMLIDKLNCLVLKDYPAEKVGGVLNPYQLTDQFTSFAKMGTQSGFLF |
| | YVPAPYTSKIDPLTGFVDPFVWKTIKNHESRKHFLEGFDFLHYDVKTGDFILHFKMNRNLSF |
| | QRGLPGFMPAWDIVFEKNETQFDAKGTPFIAGKRIVPVIENHRFTGRYRDLYPANELIALLEE |
| | KGIVFRDGSNILPKLLENDDSHAIDTMVALIRSVLQMANSNAATGEDYINSPVRDLNGVCFD |
| | SRFQNPEWPMDADANGAYHIALKGQLLLNHLKESKDLKLQNGISNQDWLAYIQELRN |
| | (SEQ ID NO: 46) |
| LbCas12a | MNYKTGLEDFIGKESLSKTLRNALIPTESTKIHMEEMGVIRDDELRAEKQQELKEIMDDYYR |
| (previously | TFIEEKLGQIQGIQWNSLFQKMEETMEDISVRKDLDKIQNEKRKEICCYFTSDKRFKDLFNA |
| known as | KLITDILPNFIKDNKEYTEEEKAEKEQTRVLFQRFATAFTNYFNQRRNNFSEDNISTAISFRIV |
| Cpf1) | NENSEIHLQNMRAFQRIEQQYPEEVCGMEEEYKDMLQEWQMKHIYSVDFYDRELTQPGIEY |
| Lachnospiraceae | YNGICGKINEHMNQFCQKNRINKNDFRMKKLHKQILCKKSSYYEIPFRFESDQEVYDALNEF |
| bacterium | IKTMKKKEIIRRCVHLGQECDDYDLGKIYISSNKYEQISNALYGSWDTIRKCIKEEYMDALP |
| GAM79 | GKGEKKEEKAEAAAKKEEYRSIADIDKIISLYGSEMDRTISAKKCITEICDMAGQISIDPLVCN |
| Ref Seq. | SDIKLLQNKEKTTEIKTILDSFLHVYQWGQTFIVSDIIEKDSYFYSELEDVLEDFEGITTLYNH |
| WP_119623382.1 | VRSYVTQKPYSTVKFKLHFGSPTLANGWSQSKEYDNNAILLMRDQKFYLGIFNVRNKPDK |
| | QIIKGHEKEEKGDYKKMIYNLLPGPSKMLPKVFITSRSGQETYKPSKHILDGYNEKRHIKSSP |
| | KFDLGYCWDLIDYYKECIHKHPDWKNYDFHFSDTKDYEDISGFYREVEMQGYQIKWTYIS |
| | ADEIQKLDEKGQIFLFQIYNKDFSVHSTGKDNLHTMYLKNLFSEENLKDIVLKLNGEAELFF |
| | RKASIKTPIVHKKGSVLVNRSYTQTVGNKEIRVSIPEEYYTEIYNYLNHIGKGKLSSEAQRYL |
| | DEGKIKSFTATKDIVKNYRYCCDHYFLHLPITINFKAKSDVAVNERTLAYIAKKEDIHIGIDR |
| | GERNLLYISVVDVHGNIREQRSFNIVNGYDYQQKLKDREKSRDAARKNWEEIEKIKELKEG |
| | YLSMVIHYIAQLVVKYNAVVAMEDLNYGFKTGRFKVERQVYQKFETMLIEKLHYLVFKDR |
| | EVCEEGGVLRGYQLTYIPESLKKVGKQCGFIFYVPAGYTSKIDPTTGFVNLESFKNLTNRESR |
| | QDFVGKFDEIRYDRDKKMFEFSFDYNNYIKKGTILASTKWKVYTNGTRLKRIVVNGKYTSQ |
| | SMEVELTDAMEKMLQRAGIEYHDGKDLKGQIVEKGIEAEIIDIFRLTVQMRNSRSESEDREY |
| | DRLISPVLNDKGEFFDTATADKTLPQDADANGAYCIALKGLYEVKQIKENWKENEQFPRNK. |
| | LVQDNKTWFDFMQKKRYL (SEQ ID NO: 47) |
| PcCas12a- | MAKNFEDFKRLYSLSKTLRFEAKPIGATLDNIVKSGLLDEDEHRAASYVKVKKLIDEYHKV |
| previously | FIDRVLDDGCLPLENKGNNNSLAEYYESYVSRAQDEDAKKKFKEIQQNLRSVIAKKLTEDK |
| known at | AYANLFGNKLIESYKDKEDKKKIIDSDLIQFINTAESTQLDSMSQDEAKELVKEFWGFVTYF |
| Cpf1 | YGFFDNRKNMYTAEEKSTGIAYRLVNENLPKFIDNIEAFNRAITRPEIQENMGVLYSDESEYL |
| Prevotella copri | NVESIQEMFQLDYYNMLLTQKQIDVYNAIIGGKTDDEHDVKIKGINEYINLYNQQHKDDKL |
| Ref Seq. | PKLKALFKQILSDRNAISWLPEEFNSDQEVLNAIKDCYERLAENVLGDKVLKSLLGSLADYS |
| WP_119227726.1 | LDGIFIRNDLQLTDISQKMFGNWGVIQNAIMQNIKRVAPARKHKESEEDYEKRIAGIFKKAD |
| | SFSISYINDCLNEADPNNAYFVENYFATFGAVNTPTMQRENLFALVQNAYTEVAALLHSDY |
| | PTVKHLAQDKANVSKIKALLDAIKSLQHFVKPLLGKGDESDKDERFYGELASLWAELDTVT |
| | PLYNMIRNYMTRKPYSQKKIKLNFENPQLLGGWDANKEKDYATIILRRNGLYYLAIMDKDS |
| | RKLLGKAMPSDGECYEKMVYKFFKDVTTMIPKCSTQLKDVQAYFKVNTDDYVLNSKAFN |
| | KPLTITKEVEDLNNVLYGKYKKFQKGYLTATGDNVGYTHAVNVWIKFCMDELNSYDSTCI |
| | YDESSLKPESYLSLDAFYQDANLLLYKLSFARASVSYINQLVEEGKMYLFQIYNKDFSEYSK |
| | GTPNMHTLYWKALFDERNLADVVYKLNGQAEMFYRKKSIENTHPTHPANHPILNKNKDNK |
| | KKESLFDYDLIKDRRYTVDKFMFHVPITMNFKSVGSENINQDVKAYLRHADDMHIIGIDRG |
| | ERHLLYLVVIDLQGNIKEQYSLNEIVNEYNGNTYHTNYHDLLDVREEERLKARQSWQTIENI |
| | KELKEGYLSQVIHKITQLMVRYHAIVVLEDLSKGFMRSRQKVEKQVYQKFEKMLIDKLNYL |
| | VDKKTDVSTPGGLLNAYQLTCKSDSSQKLGKQSGFLFYIPAWNTSKIDPVTGFVNLLDTHSL |
| | NSKEKIKAFFSKFDAIRYNKDKKWFEFNLDYDKFGKKAEDTRTKWTLCTRGMRIDTFRNKE |
| | KNSQWDNQEVDLTTEMKSLLEHYYIDIHGNLKDAISAQTDKAFFTGLLHILKLTLQMRNSIT |
| | GTETDYLVSPVADENGIFYDSRSCGNQLPENADANGAYNIARKGLMLIEQIKNAEDLNNVK |
| | FDISNKAWINFAQQKPYKNG (SEQ ID NO: 48) |
| ErCas12a- | MFSAKLISDILPEFVIHNNNYSASEKEEKTQVIKLESRFATSFKDYFKNRANCESANDISSSSC |
| previously | HRIVNDNAEIFFSNALVYRRIVKNLSNDDINKISGDMKDSLKEMSLEEIYSYEKYGEFITQEGI |
| known at | SFYNDICGKVNLFMNLYCQKNKENKNLYKLRKLHKQILCIADTSYEVPYKFESDEEVYQSV |
| Cpf1 | NGFLDNISSKHIVERLRKIGENYNGYNLDKIYIVSKFYESVSQKTYRDWETINTALEIHYNNI |
| Eubacterium | LPGNGKSKADKVKKAVKNDLQKSITEINELVSNYKLCPDDNIKAETYIHEISHILNNFEAQEL |
| rectale | KYNPEIHLVESELKASELKNVLDVIMNAFHWCSVFMTEELVDKDNNFYAELEEIYDEIYPVI |
| Ref Seq. | SLYNLVRNYVTQKPYSTKKIKLNFGIPTLADGWSKSKEYSNNAIILMRDNLYYLGIFNAKNK |
| WP_119223642.1 | PDKKIIEGNTSENKGDYKKMIYNLLPGPNKMIPKVFLSSKTGVETYKPSAYILEGYKQNKHL |
| | KSSKDFDITFCHDLIDYFKNCIAIHPEWKNFGFDESDTSTYEDISGFYREVELQGYKIDWTYIS |
| | EKDIDLLQEKGQLYLFQIYNKDFSKKSSGNDNLHTMYLKNLFSEENLKDIVLKLNGEAEIFF |
| | RKSSIKNPIIHKKGSILVNRTYEAEEKDQFGNIQIVRKTIPENIYQELYKYFNDKSDKELSDEA |
| | AKLKNVVGHHEAATNIVKDYRYTYDKYFLHMPITINFKANKTSFINDRILQYIAKEKDLHVI |
| | GIDRGERNLIYVSVIDTCGNIVEQKSFNIVNGYDYQIKLKQQEGARQIARKEWKEIGKIKEIK |
| | EGYLSLVIHEISKMVIKYNAIIAMEDLSYGFKKGRFKVERQVYQKFETMLINKLNYLVFKDIS |
| | ITENGGLLKGYQLTYIPDKLKNVGHQCGCIFYVPAAYTSKIDPTTGFVNIFKFKDLTVDAKR |
| | EFIKKFDSIRYDSDKNLFCFTFDYNNFITQNTVMSKSSWSVYTYGVRIKRRFVNGRESNESDT |
| | IDITKDMEKTLEMTDINWRDGHDLRQDIIDYEIVQHIFEIFKLTVQMRNSLSELEDRDYDRLI |
| | SPVLNENNIFYDSAKAGDALPKDADANGAYCIALKGLYEIKQITENWKEDGKFSRDKLKISN |
| | KDWFDFIQNKRYL (SEQ ID NO: 49) |
| CsCas12a | MNYKTGLEDFIGKESLSKTLRNALIPTESTKIHMEEMGVIRDDELRAEKQQELKEIMDDYYR |
| previously | AFIEEKLGQIQGIQWNSLFQKMEETMEDISVRKDLDKIQNEKRKEICCYFTSDKRFKDLFNA |
| known at | KLITDILPNFIKDNKEYTEEEKAEKEQTRVLFQRFATAFTNYFNQRRNNFSEDNISTAISFRIV |
| Cpf1 | NENSEIHLQNMRAFQRIEQQYPEEVCGMEEEYKDMLQEWQMKHIYLVDFYDRVLTQPGIE |
| Clostridium | YYNGICGKINEHMNQFCQKNRINKNDFRMKKLHKQILCKKSSYYEIPFRFESDQEVYDALN |
| sp. AF34- | EFIKTMKEKEIICRCVHLGQKCDDYDLGKIYISSNKYEQISNALYGSWDTIRKCIKEEYMDAL |
| 10BHRef | PGKGEKKEEKAEAAAKKEEYRSIADIDKIISLYGSEMDRTISAKKCITEICDMAGQISTDPLV |
| Seq. | CNSDIKLLQNKEKTTEIKTILDSFLHVYQWGQTFIVSDIIEKDSYFYSELEDVLEDFEGITTLY |
| WP_118538418.1 | NHVRSYVTQKPYSTVKFKLHFGSPTLANGWSQSKEYDNNAILLMRDQKFYLGIFNVRNKP |
| | DKQIIKGHEKEEKGDYKKMIYNLLPGPSKMLPKVFITSRSGQETYKPSKHILDGYNEKRHIK |
| | SSPKFDLGYCWDLIDYYKECIHKHPDWKNYDFHFSDTKDYEDISGFYREVEMQGYQIKWT |
| | YISADEIQKLDEKGQIFLFQIYNKDFSVHSTGKDNLHTMYLKNLFSEENLKDIVLKLNGEAEL |
| | FFRKASIKTPVVHKKGSVLVNRSYTQTVGDKEIRVSIPEEYYTEIYNYLNHIGRGKLSTEAQR |
| | YLEERKIKSFTATKDIVKNYRYCCDHYFLHLPITINFKAKSDIAVNERTLAYIAKKEDIHIIGID |
| | RGERNLLYISVVDVHGNIREQRSFNIVNGYDYQQKLKDREKSRDAARKNWEEIEKIKELKE |
| | GYLSMVIHYIAQLVVKYNAVVAMEDLNYGFKTGRFKVERQVYQKFETMLIEKLHYLVFKD |
| | REVCEEGGVLRGYQLTYIPESLKKVGKQCGFIFYVPAGYTSKIDPTTGFVNLFSFKNLTNRES |
| | RQDFVGKFDEIRYDRDKKMFEFSFDYNNYIKKGTMLASTKWKVYTNGTRLKRIVVNGKYT |
| | SQSMEVELTDAMEKMLQRAGIEYHDGKDLKGQIVEKGIEAEIIDIFRLTVQMRNSRSESEDR |
| | EYDRLISPVLNDKGEFFDTATADKTLPQDADANGAYCIALKQLYEVKQIKENWKENEQFPR |
| | NKLVQDNKTWFDFMQKKRYL (SEQ ID NO: 50) |
| BhCas12b | MATRSFILKIEPNEEVKKGLWKTHEVINHGIAYYMNILKLIRQEAIYEHHEQDPKNPKKVSK |
| Bacillus hisashii | AEIQAELWDFVLKMQKCNSFTHEVDKDEVENILRELYEELVPSSVEKKGEANQLSNKFLYP |
| Ref Seq. | LVDPNSQSGKGTASSGRKPRWYNIKIAGDPSWEEEKKKWEEDKKKDPLAKILGKLAEYGLI |
| WP_095142515.1 | PLFIPYTDSNEPIVKEIKWMEKSRNQSVRRLDKDMFIQALERFLSWESWNLKVKEEYEKVEK |
| | EYKTLEERIKEDIQALKALEQYEKERQEQLLRDTLNTNEYRLSKRGLRGWREIIQKWLKMD |
| | JENEPSEKYLEVFKDYQRKHPREAGDYSVYEFLSKKENHFIWRNHPEYPYLYATFCEIDKKK |
| | KDAKQQATFTLADPINHPLWVRFEERSGSNLNKYRILTEQLHTEKLKKKLTVQLDRLIYPTE |
| | SGGWEEKGKVDIVLLPSRQFYNQIFLDIEEKGKHAFTYKDESIKFPLKGTLGGARVQFDRDH |
| | LRRYPHKVESGNVGRIYFNMTVNIEPTESPVSKSLKIHRDDFPKVVNFKPKELTEWIKDSKG |
| | KKLKSGIESLEIGLRVMSIDLGQRQAAAASIFEVVDQKPDIEGKLFFPIKGTELYAVHRASFNI |
| | KLPGETLVKSREVLRKAREDNLKLMNQKLNFLRNVLHFQQFEDITEREKRVTKWISRQENS |
| | DVPLVYQDELIQIRELMYKPYKDWVAFLKQLHKRLEVEIGKEVKHWRKSLSDGRKGLYGIS |
| | LKNIDEIDRTRKFLLRWSLRPTEPGEVRRLEPGQRFAIDQLNHLNALKEDRLKKMANTIIMH |
| | ALGYCYDVRKKKWQAKNPACQIILFEDLSNYNPYEERSRFENSKLMKWSRREIPRQVALQG |
| | EIYGLQVGEVGAQFSSRFHAKTGSPGIRCSVVTKEKLQDNRFFKNLQREGRLTLDKIAVLKE |
| | GDLYPDKGGEKFISLSKDRKCVTTHADINAAQNLQKRFWTRTHGFYKVYCKAYQVDGQTV |
| | YIPESKDQKQKIIEEFGEGYFILKDGVYEWVNAGKLKIKKGSSKQSSSELVDSDILKDSFDLA |
| | SELKGEKLMLYRDPSGNVFPSDKWMAAGVFFGKLERILISKLTNQYSISTIEDDSSKQSM |
| | (SEQ ID NO: 44) |
| ThCas12b | MSEKTTQRAYTLRLNRASGECAVCQNNSCDCWHDALWATHKAVNRGAKAFGDWLLTLR |
| Thermomonas | GGLCHTLVEMEVPAKGNNPPQRPTDQERRDRRVLLALSWLSVEDEHGAPKEFIVATGRDS |
| hydrothermalis | ADDRAKKVEEKLREILEKRDFQEHEIDAWLQDCGPSLKAHIREDAVWVNRRALFDAAVERI |
| Ref Seq. | KTLTWEEAWDFLEPFFGTQYFAGIGDGKDKDDAEGPARQGEKAKDLVQKAGQWLSARFGI |
| WP_072754838 | GTGADEMSMAEAYEKIAKWASQAQNGDNGKATIEKLACALRPSEPPTLDTVLKCISGPGHK |
| | SATREYLKTLDKKSTVTQEDLNQLRKLADEDARNCRKKVGKKGKKPWADEVLKDVENSC |
| | ELTYLQDNSPARHREFSVMLDHAARRVSMAHSWIKKAEQRRRQFESDAQKLKNLQERAPS |
| | AVEWLDRFCESRSMTTGANTGSGYRIRKRAIEGWSYVVQAWAEASCDTEDKRIAAARKVQ |
| | ADPEIEKFGDIQLFEALAADEAICVWRDQEGTQNPSILIDYVTGKTAEHNQKRFKVPAYRHP |
| | DELRHPVFCDFGNSRWSIQFAIHKEIRDRDKGAKQDTRQLQNRHGLKMRLWNGRSMTDVN |
| | LHWSSKRLTADLALDQNPNPNPTEVTRADRLGRAASSAFDHVKIKNVFNEKEWNGRLQAP |
| | RAELDRIAKLEEQGKTEQAEKLRKRLRWYVSFSPCLSPSGPFIVYAGQHNIQPKRSGQYAPH |
| | AQANKGRARLAQLILSRLPDLRILSVDLGHRFAAACAVWETLSSDAFRREIQGLNVLAGGS |
| | GEGDLFLHVEMTGDDGKRRTVVYRRIGPDQLLDNTPHPAPWARLDRQFLIKLQGEDEGVR |
| | EASNEELWTVHKLEVEVGRTVPLIDRMVRSGFGKTEKQKERLKKLRELGWISAMPNEPSAE |
| | TDEKEGEIRSISRSVDELMSSALGTLRLALKRHGNRARIAFAMTADYKPMPGGQKYYFHEA |
| | KEASKNDDETKRRDNQIEFLQDALSLWHDLFSSPDWEDNEAKKLWQNHIATLPNYQTPEEI |
| | SAELKRVERNKKRKENRDKLRTAAKALAENDQLRQHLHDTWKERWESDDQQWKERLRSL |
| | KDWIFPRGKAEDNPSIRHVGGLSITRINTISGLYQILKAFKMRPEPDDLRKNIPQKGDDELEN |
| | FNRRLLEARDRLREQRVKQLASRIIEAALGVGRIKIPKNGKLPKRPRTTVDTPCHAVVIESLK |
| | TYRPDDLRTRRENRQLMQWSSAKVRKYLKEGCELYGLHFLEVPANYTSRQCSRTGLPGIRC |
| | DDVPTGDFLKAPWWRRAINTAREKNGGDAKDRFLVDLYDHLNNLQSKGEALPATVRVPR |
| | QGGNLFIAGAQLDDINKERRAIQADLNAAANIGLRALLDPDWRGRWWYVPCKDGTSEPAL |
| | DRIEGSTAFNDVRSLPTGDNSSRRAPREIENLWRDPSGDSLESGTWSPTRAYWDTVQSRVIE |
| | LLRRHAGLPTS (SEQ ID NO: 51) |
| LsCas12b | MSIRSFKLKLKTKSGVNAEQLRRGLWRTHQLINDGIAYYMNWLVLLRQEDLFIRNKETNEI |
| Laceyella sacchari | EKRSKEEIQAVLLERVHKQQQRNQWSGEVDEQTLLQALRQLYEEIVPSVIGKSGNASLKAR |
| WP_132221894.1 | FFLGPLVDPNNKTTKDVSKSGPTPKWKKMKDAGDPNWVQEYEKYMAERQTLVRLEEMGL |
| | IPLFPMYTDEVGDIHWLPQASGYTRTWDRDMFQQAIERLLSWESWNRRVRERRAQFEKKT |
| | HDFASRFSESDVQWMNKLREYEAQQEKSLEENAFAPNEPYALTKKALRGWERVYHSWMR |
| | LDSAASEEAYWQEVATCQTAMRGEFGDPAIYQFLAQKENHDIWRGYPERVIDFAELNHLQ |
| | RELRRAKEDATFTLPDSVDHPLWVRYEAPGGTNIHGYDLVQDTKRNLTLILDKFILPDENGS |
| | WHEVKKVPFSLAKSKQFHRQVWLQEEQKQKKREVVFYDYSTNLPHLGTLAGAKLQWDRN |
| | FLNKRTQQQIEETGEIGKVFFNISVDVRPAVEVKNGRLQNGLGKALTVLTHPDGTKIVTGW |
| | KAEQLEKWVGESGRVSSLGLDSLSEGLRVMSIDLGQRTSATVSVFEITKEAPDNPYKFFYQL |
| | EGTEMFAVHQRSFLLALPGENPPQKIKQMREIRWKERNRIKQQVDQLSAILRLHKKVNEDE |
| | RIQAIDKLLQKVASWQLNEEIATAWNQALSQLYSKAKENDLQWNQAIKNAHHQLEPVVGK |
| | QISLWRKDLSTGRQGIAGLSLWSIEELEATKKLLTRWSKRSREPGVVKRIERFETFAKQIQHH |
| | INQVKENRLKQLANLIVMTALGYKYDQEQKKWIEVYPACQVVLFENLRSYRFSFERSRREN |
| | KKLMEWSHRSIPKLVQMQGELFGLQVADVYAAYSSRYHGRTGAPGIRCHALTEADLRNET |
| | NIIHELIEAGFIKEEHRPYLQQGDLVPWSGGELFATLQKPYDNPRILTLHADINAAQNIQKRF |
| | WHPSMWFRVNCESVMEGEIVTYVPKNKTVHKKQGKTFRFVKVEGSDVYEWAKWSKNRN |
| | KNTFSSITERKPPSSMILFRDPSGTFFKEQEWVEQKTFWGKVQSMIQAYMKKTIVQRMEE |
| | (SEQ ID NO: 52) |
| DtCas12b | MVLGRKDDTAELRRALWTTHEHVNLAVAEVERVLLRCRGRSYWTLDRRGDPVHVPESQV |
| Dsulfonatronum | AEDALAMAREAQRRNGWPVVGEDEEILLALRYLYEQIVPSCLLDDLGKPLKGDAQKIGTN |
| thiodismutans | YAGPLFDSDTCRRDEGKDVACCGPFHEVAGKYLGALPEWATPISKQEFDGKDASHLRFKA |
| WP_031386437 | TGGDDAFFRVSIEKANAWYEDPANQDALKNKAYNKDDWKKEKDKGISSWAVKYIQKQLQ |
| | LGQDPRTEVRRKLWLELGLLPLFIPVFDKTMVGNLWNRLAVRLALAHLLSWESWNHRAVQ |
| | DQALARAKRDELAALFLGMEDGFAGLREYELRRNESIKQHAFEPVDRPYVVSGRALRSWT |
| | RVREEWLRHGDTQESRKNICNRLQDRLRGKFGDPDVFHWLAEDGQEALWKERDCVTSFSL |
| | LNDADGLLEKRKGYALMTFADARLHPRWAMYEAPGGSNLRTYQIRKTENGLWADVVLLS |
| | PRNESAAVEEKTFNVRLAPSGQLSNVSFDQIQKGSKMVGRCRYQSANQQFEGLLGGAEILF |
| | DRKRIANEQHGATDLASKPGHVWFKLTLDVRPQAPQGWLDGKGRPALPPEAKHFKTALSN |
| | KSKFADQVRPGLRVLSVDLGVRSFAACSVFELVRGGPDQGTYFPAADGRTVDDPEKLWAK |
| | HERSFKITLPGENPSRKEEIARRAAMEELRSLNGDIRRLKAILRLSVLQEDDPRTEHLRLFME |
| | AIVDDPAKSALNAELFKGFGDDRFRSTPDLWKQHCHFFHDKAEKVVAERFSRWRTETRPKS |
| | SSWQDWRERRGYAGGKSYWAVTYLEAVRGLILRWNMRGRTYGEVNRQDKKQFGTVASA |
| | LLHHINQLKEDRIKTGADMIIQAARGFVPRKNGAGWVQVHEPCRLILFEDLARYRFRTDRSR |
| | RENSRLMRWSHREIVNEVGMQGELYGLHVDTTEAGFSSRYLASSGAPGVRCRHLVEEDFH |
| | DGLPGMHLVGELDWLLPKDKDRTANEARRLLGGMVRPGMLVPWDGGELFATLNAASQL |
| | HVIHADINAAQNLQRRFWGRCGEAIRIVCNQLSVDGSTRYEMAKAPKARLLGALQQLKNG |
| | DAPFHLTSIPNSQKPENSYVMTPTNAGKKYRAGPGEKSSGEEDELALDIVEQAEELAQGRKT |
| | FFRDPSGVFFAPDRWLPSEIYWSRIRRRIWQVTLERNSSGRQERAEMDEMPY (SEQ ID NO: |
| | 53) |

[0378] The prime editors utilized in the methods and compositions described herein may also comprise Cas12a (Cpf1) (dCpf1) variants that may be used as a guide nucleotide sequence-programmable DNA-binding protein domain. The Cas12a (Cpf1) protein has a RuvC-like endonuclease domain that is similar to the RuvC domain of Cas9 but does not have a HNH endonuclease domain, and the N-terminal of Cas12a (Cpf1) does not have the alfa-helical recognition lobe of Cas9. It was shown in Zetsche et al., Cell, 163, 759-771, 2015 (which is incorporated herein by reference) that, the RuvC-like domain of Cas12a (Cpf1) is responsible for cleaving both DNA strands and inactivation of the RuvC-like domain inactivates Cas12a (Cpf1) nuclease activity.

[0379] In some embodiments, the napDNAbp is a single effector of a microbial CRISPR-Cas system. Single effectors of microbial CRISPR-Cas systems include, without limitation, Cas9, Cas12a (Cpf1), Cas12b1 (C2c1), Cas13a (C2c2), and Cas12c (C2c3). Typically, microbial CRISPR-Cas systems are divided into Class 1 and Class 2 systems. Class 1 systems have multi-subunit effector complexes, while Class 2 systems have a single protein effector. For example, Cas9 and Cas12a (Cpf1) are Class 2 effectors. In addition to Cas9 and Cas12a (Cpf1), three distinct Class 2 CRISPR-Cas systems (Cas12b1, Cas13a, and Cas12c) have been described by Shmakov et al., “Discovery and Functional Characterization of Diverse Class 2 CRISPR Cas Systems”, Mol. Cell, 2015 Nov. 5; 60(3): 385-397, the entire contents of which are hereby incorporated by reference.

[0380] Effectors of two of the systems, Cas12b1 and Cas12c, contain RuvC-like endonuclease domains related to Cas12a. A third system, Cas13a contains an effector with two predicted HEPN RNase domains. Production of mature CRISPR RNA is tracrRNA-independent, unlike production of CRISPR RNA by Cas12b1, Cas12b1 depends on both CRISPR RNA and tracrRNA for DNA cleavage. Bacterial Cas13a has been shown to possess a unique RNase activity for CRISPR RNA maturation distinct from its RNA-activated single-stranded RNA degradation activity. These RNase functions are different from each other and from the CRISPR RNA-processing behavior of Cas12a. See, e.g., East-Seletsky, et al., “Two distinct RNase activities of CRISPR-Cas13a enable guide-RNA processing and RNA detection”, Nature, 2016 Oct. 13; 538(7624):270-273, the entire contents of which are hereby incorporated by reference. In vitro biochemical analysis of Cas13a in Leptotrichia shahii has shown that Cas13a is guided by a single CRISPR RNA and can be programed to cleave ssRNA targets carrying complementary protospacers. Catalytic residues in the two conserved HEPN domains mediate cleavage. Mutations in the catalytic residues generate catalytically inactive RNA-binding proteins. See e.g., Abudayyeh et al., “C2c2 is a single-component programmable RNA-guided RNA-targeting CRISPR effector”, Science, 2016 Aug. 5; 353(6299), the entire contents of which are hereby incorporated by reference.

[0381] The crystal structure of Alicyclobaccillus acidoterrastris Cas12b1 (AacC2c1) has been reported in complex with a chimeric single-molecule guide RNA (sgRNA). See e.g., Liu el al., “C2c1-sgRNA Complex Structure Reveals RNA-Guided DNA Cleavage Mechanism”, Mol. Cell, 2017 Jan. 19:65(2):310-322, the entire contents of which are hereby incorporated by reference. The crystal structure has also been reported in Alicyclobacillus acidoterrestris C2c1 bound to target DNAs as ternary complexes. See e.g., Yang et al., “PAM-dependent Target DNA Recognition and Cleavage by C2C1 CRISPR-Cas endonuclease”, Cell. 2016 Dec. 15; 167(7):1814-1828, the entire contents of which are hereby incorporated by reference. Catalytically competent conformations of AacC2c1, both with target and non-target DNA strands, have been captured independently positioned within a single RuvC catalytic pocket, with C2c1-mediated cleavage resulting in a staggered seven-nucleotide break of target DNA. Structural comparisons between C2c1 ternary complexes and previously identified Cas9 and Cpf1 counterparts demonstrate the diversity of mechanisms used by CRISPR-Cas9 systems. In some embodiments, the napDNAbp may be a C2c1, a C2c2, or a C2c3 protein. In some embodiments, the napDNAbp is a C2c1 protein. In some embodiments, the napDNAbp is a Cas13a protein. In some embodiments, the napDNAbp is a Cas12c protein. In some embodiments, the napDNAbp comprises an amino acid sequence that is at least 85%, at least 90%, at least 91%, at least 92%, at least 93%, at least 94%, at least 95%, at least 96%, at least 97%, at least 98%, at least 99%, or at least 99.5% identical to a naturally-occurring Cas12b1 (C2c1), Cas13a (C2c2), or Cas12c (C2c3) protein. In some embodiments, the napDNAbp is a naturally-occurring Cas12b1 (C2c1), Cas13a (C2c2), or Cas12c (C2c3) protein.

### H, Cas9 Circular Permutants

[0382] In various embodiments, the prime editors utilized in the methods and compositions disclosed herein may comprise a circular permutant of Cas9.

[0383] The term “circularly permuted Cas9” or “circular permutant” of Cas9 or “CP-Cas9”) refers to any Cas9 protein, or variant thereof, that occurs or has been modified or engineered as a circular permutant variant, which means the N-terminus and the C-terminus of a Cas9 protein (e.g., a wild type Cas9 protein) have been topically rearranged. Such circularly permuted Cas9 proteins, or variants thereof, retain the ability to bind DNA when complexed with a guide RNA (gRNA). See, Oakes et al., “Protein Engineering of Cas9 for enhanced function,” Methods Enzymol. 2014, 546: 491-511 and Oakes et al., “CRISPR-Cas9 Circular Permutants as Programmable Scaffolds for Genome Modification,” Cell, Jan. 10, 2019, 176: 254-267, each of are incorporated herein by reference. The instant disclosure contemplates any previously known CP-Cas9 or use a new CP-Cas9 so long as the resulting circularly permuted protein retains the ability to bind DNA when complexed with a guide RNA (gRNA).

[0384] Any of the Cas9 proteins described herein, including any variant, ortholog, or any engineered or naturally occurring Cas9 or equivalent thereof, may be reconfigured as a circular permutant variant.

[0385] In various embodiments, the circular permutants of Cas9 may have the following structure: N-terminus-[original C-terminus]-[optional linker]-[original N-terminus]-C-terminus.

[0386] As an example, the present disclosure contemplates the following circular permutants of canonical S. pyogenes Cas9 (1368 amino acids of UniProtKB—Q99ZW2 (CAS9_STRP1) (numbering is based on the amino acid position in SEQ ID NO: 2)):
[0387] N-terminus-[1268-1368]-[optional linker]-[1-1267]-C-terminus;
[0388] N-terminus-[1168-1368]-[optional linker]-[1-1167]-C-terminus;
[0389] N-terminus-[1068-1368]-[optional linker]-[1-1067]-C-terminus;
[0390] N-terminus-[968-1368]-[optional linker]-[1-967]-C-terminus;
[0391] N-terminus-[868-1368]-[optional linker]-[1-867]-C-terminus;
[0392] N-terminus-[768-1368]-[optional linker]-[1-767]-C-terminus;
[0393] N-terminus-[668-1368]-[optional linker]-[1-667]-C-terminus;
[0394] N-terminus-[568-1368]-[optional linker]-[1-567]-C-terminus;
[0395] N-terminus-[468-1368]-[optional linker]-[1-467]-C-terminus;
[0396] N-terminus-[368-1368]-[optional linker]-[1-367]-C-terminus;
[0397] N-terminus-[268-1368]-[optional linker]-[1-267]-C-terminus;
[0398] N-terminus-[168-1368]-[optional linker]-[1-167]-C-terminus;
[0399] N-terminus-[68-1368]-[optional linker]-[1-67]-C-terminus; or
[0400] N-terminus-[10-1368]-[optional linker]-[1-9]-C-terminus, or the corresponding circular permutants of other Cas9 proteins (including other Cas9 orthologs, variants, etc.).

[0401] In particular embodiments, the circular permutant Cas9 has the following structure (based on S. pyogenes Cas9 (1368 amino acids of UniProtKB—Q99ZW2 (CAS9_STRP1) (numbering is based on the amino acid position in SEQ ID NO: 2):
[0402] N-terminus-[102-1368]-[optional linker]-[1-101]-C-terminus;
[0403] N-terminus-[1028-1368]-[optional linker]-[1-1027]-C-terminus;
[0404] N-terminus-[1041-1368]-[optional linker]-[1-1043]-C-terminus;
[0405] N-terminus-[1249-1368]-[optional linker]-[1-1248]-C-terminus; or
[0406] N-terminus-[1300-1368]-[optional linker]-[1-1299]-C-terminus, or the corresponding circular permutants of other Cas9 proteins (including other Cas9 orthologs, variants, etc.).

[0407] In still other embodiments, the circular permeant Cas9 has the following structure (based on S. pyogenes Cas9 (1368 amino acids of UniProtKB—Q99ZW2 (CAS9_STRP1) (numbering is based on the amino acid position in SEQ ID NO: 2):
[0408] N-terminus-[103-1368]-[optional linker]-[1-102]-C-terminus;
[0409] N-terminus-[1029-1368]-[optional linker]-[1-1028]-C-terminus;
[0410] N-terminus-[1042-1368]-[optional linker]-[1-1041]-C-terminus;
[0411] N-terminus-[1250-1368]-[optional linker]-[1-1249]-C-terminus; or
[0412] N-terminus-[1301-1368]-[optional linker]-[1-1300]-C-terminus, or the corresponding circular permutants of other Cas9 proteins (including other Cas9 orthologs, variants, etc.).

[0413] In some embodiments, the circular permutant can be formed by linking a C-terminal fragment of a Cas9 to an N-terminal fragment of a Cas9, either directly or by using a linker, such as an amino acid linker. In some embodiments, The C-terminal fragment may correspond to the C-terminal 95% or more of the amino acids of a Cas9 (e.g., amino acids about 1300-1368), or the C-terminal 90%, 85%, 80%, 75%, 70%, 65%, 60%, 55%, 50%, 45%, 40%, 35%, 30%, 25%, 20%, 15%, 10%, or 5% or more of a Cas9 (e.g., any one of SEQ ID NOs: 54-63). The N-terminal portion may correspond to the N-terminal 95% or more of the amino acids of a Cas9 (e.g., amino acids about 1-1300), or the N-terminal 90%, 85%, 80%, 75%, 70%, 65%, 60%, 55%, 50%, 45%, 40%, 35%, 30%, 25%, 20%, 15%, 10%, or 5% or more of a Cas9 (e.g., of SEQ ID NO: 2).

[0414] In some embodiments, the circular permutant can be formed by linking a C-terminal fragment of a Cas9 to an N-terminal fragment of a Cas9, either directly or by using a linker, such as an amino acid linker. In some embodiments, the C-terminal fragment that is rearranged to the N-terminus includes or corresponds to the C-terminal 30% or less of the amino acids of a Cas9 (e.g., amino acids 1012-1368 of SEQ ID NO: 2). In some embodiments, the C-terminal fragment that is rearranged to the N-terminus includes or corresponds to the C-terminal 30%, 29%, 28%, 27%, 26%, 25%, 24%, 23%, 22%, 21%, 20%, 19%, 18%, 17%, 16%, 15%, 14%, 13%, 12%, 11%, 10%, 9%, 8%, 7%, 6%, 5%, 4%, 3%, 2%, or I % of the amino acids of a Cas9 (e.g., the Cas9 of SEQ ID NO: 2). In some embodiments, the C-terminal fragment that is rearranged to the N-terminus includes or corresponds to the C-terminal 410 residues or less of a Cas9 (e.g., the Cas9 of SEQ ID NO: 2). In some embodiments, the C-terminal portion that is rearranged to the N-terminus includes or corresponds to the C-terminal 410, 400, 390, 380, 370, 360, 350, 340, 330, 320, 310, 300, 290, 280, 270, 260, 250, 240, 230, 220, 210, 200, 190, 180, 170, 160, 150, 140, 130, 120, 110, 100, 90, 80, 70, 60, 50, 40, 30, 20, or 10 residues of a Cas9 (e.g., the Cas9 of SEQ ID NO: 2). In some embodiments, the C-terminal portion that is rearranged to the N-terminus includes or corresponds to the C-terminal 357, 341, 328, 120, or 69 residues of a Cas9 (e.g., the Cas9 of SEQ ID NO: 2).

[0415] In other embodiments, circular permutant Cas9 variants may be defined as a topological rearrangement of a Cas9 primary structure based on the following method, which is based on S. pyogenes Cas9 of SEQ ID NO: 2: (a) selecting a circular permutant (CP) site corresponding to an internal amino acid residue of the Cas9 primary structure, which dissects the original protein into two halves: an N-terminal region and a C-terminal region; (b) modifying the Cas9 protein sequence (e.g., by genetic engineering techniques) by moving the original C-terminal region (comprising the CP site amino acid) to precede the original N-terminal region, thereby forming a new N-terminus of the Cas9 protein that now begins with the CP site amino acid residue. The CP site can be located in any domain of the Cas9 protein, including, for example, the helical-II domain, the RuvCIII domain, or the CTD domain. For example, the CP site may be located (relative the S. pyogenes Cas9 of SEQ ID NO: 2) at original amino acid residue 181, 199, 230, 270, 310, 1010, 1016, 1023, 1029, 1041, 1247, 1249, or 1282. Thus, once relocated to the N-terminus, original amino acid 181, 199, 230, 270, 310, 1010, 1016, 1023, 1029, 1041, 1247, 1249, or 1282 would become the new N-terminal amino acid. Nomenclature of these CP-Cas9 proteins may be referred to as Cas9-CP¹⁸¹, Cas9-CP¹⁹⁹, Cas9-CP²¹⁰, Cas9-CP²⁷⁰, Cas9-CP³¹⁰, Cas9-CP¹⁰¹⁰, Cas9-CP¹⁰¹⁶, Cas9-CP¹⁰²³, Cas9-CP¹⁰²⁹, Cas9-CP¹⁰⁴¹, Cas9-CP¹²⁴⁷, Cas9-CP¹²⁴⁹, and Cas9-CP¹²⁸², respectively. This description is not meant to be limited to making CP variants from SEQ ID NO: 2, but may be implemented to make CP variants in any Cas9 sequence, either at CP sites that correspond to these positions, or at other CP sites entirely. This description is not meant to limit the specific CP sites in any way. Virtually any CP site may be used to form a CP-Cas9 variant.

[0416] Exemplary CP-Cas9 amino acid sequences, based on the Cas9 of SEQ ID NO: 2, are provided below in which linker sequences are indicated by underlining and optional methionine (M) residues are indicated in bold. It should be appreciated that the disclosure provides CP-Cas9 sequences that do not include a linker sequence or that include different linker sequences. It should be appreciated that CP-Cas9 sequences may be based on Cas9 sequences other than that of SEQ ID NO: 2 and any examples provided herein are not meant to be limiting. Exemplary CP-Cas9 sequences are as follows:

| | | SEQ |
|---|---|---|
| CP name | Sequence | ID NO: |
| CP1012 | DYKVYDVRKMIAKSEQEIGKATAKYFFYSNIMNFFKTEITLANGEIRKRPLIETNGETGE | 54 |
| | IVWDKGRDFATVRKVLSMPQVNIVKKTEVQTGGFSKESILPKRNSDKLIARKKDWDPK | |
| | KYGGFDSPTVAYSVLVVAKVEKGKSKKLKSVKELLGITIMERSSFEKNPIDFLEAKGYK | |
| | EVKKDLIIKLPKYSLFELENGRKRMLASAGELQKGNELALPSKYVNFLYLASHYEKLK | |
| | GSPEDNEQKQLFVEQHKHYLDEIIEQISEFSKRVILADANLDKVLSAYNKHRDKPIREQ | |
| | AENIIHLFTLINLGAPAAFKYFDTTIDRKRYTSTKEVLDATLIHQSITGLYETRIDLSQLG | |
| | GDGGSGGSGGSGGSGGSGGSGGDKKYSIGLAIGTNSVGWAVITDEYKVPSKKFKVLG | |
| | NTDRHSIKKNLIGALLFDSGETAEATRLKRTARRRYTRRKNRICYLQEIFSNEMAKVDD | |
| | SFFHRLEESFLVEEDKKHERHPIFGNIVDEVAYHEKYPTIYHLRKKLVDSTDKADLRLIY | |
| | LALAHMIKFRGHFLIEGDLNPDNSDVDKLFIQLVQTYNQLFEENPINASGVDAKAILSA | |
| | RLSKSRRLENLIAQLPGEKKNGLFGNLIALSLGLTPNFKSNFDLAEDAKLQLSKDTYDD | |
| | DLDNLLAQIGDQYADLFLAAKNLSDAILLSDILRVNTEITKAPLSASMIKRYDEHHQDL | |
| | TLLKALVRQQLPEKYKEIFFDQSKNGYAGYIDGGASQEEFYKFIKPILEKMDGTEELLV | |
| | KLNREDLLRKQRTFDNGSIPHQIHLGELHAILRRQEDFYPFLKDNREKIEKILTFRIPYYV | |
| | GPLARGNSRFAWMTRKSEETITPWNFEEVVDKGASAQSFIERMTNFDKNLPNEK VLPK | |
| | HSLLYEYFTVYNELTKVKYVTEGMRKPAFLSGEQKKAIVDLLFKTNRKVTVKOLKED | |
| | YFKKIECFDSVEISGVEDRFNASLGTYHDLLKIIKDKDFLDNEENEDILEDIVLTLTLFED | |
| | REMIEERLKTYAHLFDDKVMKOLKRRRYTGWGRLSRKLINGIRDKQSGKTILDFLKSD | |
| | GFANRNEMQLIHDDSLTFKEDIQKAQVSGQGDSLHEHIANLAGSPAIKKGILQTVKVVD | |
| | ELVKVMGRHKPENIVIEMARENQTTQKGQKNSRERMKRIEEGIKELGSQILKEHPVEN | |
| | TQLQNEKLYLYYLONGRDMYVDQELDINRLSDYDVDHIVPQSFLKDDSIDNKVLTRSD | |
| | KNROKSDNVPSEEVVKKMKNYWRQLLNAKLITQRKFDNLTKAERGGLSELDKAGFIK | |
| | RQLVETROITKHVAQILDSRMNTKYDENDKLIREVKVITLKSKLVSDFRKDFQFYKVRE | |
| | INNYHHAHDAYLNAVVGTALIKKYPKLESEFVYG | |
| CP1028 | EIGKATAKYFFYSNIMNFFKTEITLANGEIRKRPLIETNGETGEIVWDKGRDFATVRKV | 55 |
| | LSMPQVNIVKKTEVQTGGFSKESILPKRNSDKLIARKKDWDPKKYGGFDSPTVAYSVL | |
| | VVAKVEKGKSKKLKSVKELLGITIMERSSFEKNPIDFLEAKGYKEVKKDLIIKLPKYSL | |
| | FELENGRKRMLASAGELOKGNELALPSKYVNFLYLASHYEKLKGSPEDNEQKQLFVE | |
| | QHKHYLDEIIEQISEFSKRVILADANLDKVLSAYNKHRDKPIREQAENIIHLFTLINLGA | |
| | PAAFKYFDTTIDRKRYTSTKEVLDATLIHQSITGLYETRIDLSQLGGDGGSGGSGGSGG | |
| | SGGSGGSGGMDKKYSIGLAIGTNSVGWAVITDEYKVPSKKFKVLGNTDRHSIKKNLIG | |
| | ALLFDSGETAEATRLKRTARRRYTRRKNRICYLQEIFSNEMAKVDDSFFHRLEESFLVE | |
| | EDKKHERHPIFGNIVDEVAYHEKYPTIYHLRKKLVDSTDKADLRLIYLALAHMIKFRG | |
| | HFLIEGDLNPDNSDVDKLFIQLVQTYNQLFEENPINASGVDAKAILSARLSKSRRLENLI | |
| | AQLPGEKKNGLFGNLIALSLGLTPNFKSNFDLAEDAKLQLSKDTYDDDLDNLLAQIGD | |
| | QYADLFLAAKNLSDAILLSDILRVNTEITKAPLSASMIKRYDEHHQDLTLLKALVRQQL | |
| | PEKYKEIFFDQSKNGYAGYIDGGASQEEFYKFIKPILEKMDGTEELLVKLNREDLLRKQ | |
| | RTFDNGSIPHQIHLGELHAILRRQEDFYPFLKDNREKIEKILTFRIPYYVGPLARGNSRFA | |
| | WMTRKSEETITPWNFEEVVDKGASAQSFIERMTNFDKNLPNEKVLPKHSLLYEYFTVY | |
| | NELTKVKYVTEGMRKPAFLSGEQKKAIVDLLFKTNRKVTVKQLKEDYFKKIECFDSV | |
| | EISGVEDRFNASLGTYHDLLKIIKDKDFLDNEENEDILEDIVLTLTLFEDREMIEERLKT | |
| | YAHLFDDKVMKOLKRRRYTGWGRLSRKLINGIRDKQSGKTILDFLKSDGFANRNFMQ | |
| | LIHDDSLTFKEDIQKAQVSGQGDSLHEHIANLAGSPAIKKGILQTVKVVDELVKVMGR | |
| | HKPENIVIEMARENOTTOKGQKNSRERMKRIEEGIKELGSQILKEHPVENTQLQNEKLY | |
| | LYYLONGRDMYVDQELDINRLSDYDVDHIVPQSFLKDDSIDNKVLTRSDKNRGKSDN | |
| | VPSEEVVKKMKNYWRQLLNAKLITORKEDNLTKAERGGLSELDKAGFIKRQLVETRQ | |
| | ITKHVAQILDSRMNTKYDENDKLIREVKVITLKSKLVSDFRKDFOFYKVREINNYHHA | |
| | HDAYLNAVVGTALIKKYPKLESEFVYGDYKVYDVRKMIAKSEQ | |
| CP1041 | NIMNFFKTEITLANGEIRKRPLIETNGETGEIVWDKGRDFATVRKVLSMPQVNIVKKTE | 56 |
| | VQTGGFSKESILPKRNSDKLIARKKDWDPKKYGGFDSPTVAYSVLVVAKVEKGKSKK | |
| | LKSVKELLGITIMERSSFEKNPIDFLEAKGYKEVKKDLIIKLPKYSLFELENGRKRMLAS | |
| | AGELQKGNELALPSKYVNFLYLASHYEKLKGSPEDNEQKQLFVEQHKHYLDEIIEQISE | |
| | FSKRVILADANLDKVLSAYNKHRDKPIREQAENIIHLFTLTNLGAPAAFKYFDTTIDRK | |
| | RYTSTKEVLDATLIHQSITGLYETRIDLSQLGGDGGSGGSGGSGGSGGSGGSGGDKKY | |
| | SIGLAIGTNSVGWAVITDEYKVPSKKFKVLGNTDRHSIKKNLIGALLFDSGETAEATRL | |
| | KRTARRRYTRRKNRICYLQEIFSNEMAKVDDSFFHRLEESFLVEEDKKHERHPIFGNIV | |
| | DEVAYHEKYPTIYHLRKKLVDSTDKADLRLIYLALAHMIKFRGHFLIEGDLNPDNSDV | |
| | DKLFIQLVQTYNQLFEENPINASGVDAKAILSARLSKSRRLENLIAQLPGEKKNGLFGN | |
| | LIALSLGLTPNFKSNFDLAEDAKLQLSKDTYDDDLDNLLAQIGDQYADLFLAAKNLSD | |
| | AILLSDILRVNTEITKAPLSASMIKRYDEHHQDLTLLKALVROQLPEKYKEIFFDQSKN | |
| | GYAGYIDGGASQEEFYKFIKPILEKMDGTEELLVKLNREDLLRKORTFDNGSIPHQIHL | |
| | GELHAILRRQEDFYPFLKDNREKIEKILTFRIPYYVGPLARGNSRFAWMTRKSEETITP | |
| | WNFEEVVDKGASAQSFIERMTNFDKNLPNEKVLPKHSLLYEYFTVYNELTKVKYVTE | |
| | GMRKPAFLSGEQKKAIVDLLFKTNRKVTVKQLKEDYFKKIECFDSVEISGVEDRENAS | |
| | LGTYHDLLKIIKDKDFLDNEENEDILEDIVLTLTLFEDREMIEERLKTYAHLFDDKVMK | |
| | QLKRRRYTGWGRLSRKLINGIRDKQSGKTILDFLKSDGFANRNFMQLIHDDSLTFKEDI | |
| | QKAQVSGQGDSLHEHIANLAGSPAIKKGILQTVKVVDELVKVMGRHKPENIVIEMARE | |
| | NOTTQKGQKNSRERMKRIEEGIKELGSQILKEHPVENTQLQNEKLYLYYLONGRDMY | |
| | VDQELDINRLSDYDVDHIVPQSFLKDDSIDNKVLTRSDKNRGKSDNVPSEEVVKKMK | |
| | NYWROLLNAKLITORKFDNLTKAERGGLSELDKAGFIKRQLVETRQITKHVAQILDSR | |
| | MNTKYDENDKLIREVKVITLKSKLVSDFRKDFQFYKVREINNYHHAHDAYLNAVVGT | |
| | ALIKKYPKLESEFVYGDYKVYDVRKMIAKSEQEIGKATAKYFFYS | |
| CP1249 | PEDNEQKQLFVEQHKHYLDEIIEQISEFSKRVILADANLDKVLSAYNKHRDKPIREQAE | 57 |
| | NIIHLFTLTNLGAPAAFKYFDTTIDRKRYTSTKEVLDATLIHQSITGLYETRIDLSQLGG | |
| | DGGSGGSGGSGGSGGSGGSGGMDKKYSIGLAIGTNSVGWAVITDEYKVPSKKFKVLG | |
| | NTDRHSIKKNLIGALLEDSGETAEATRLKRTARRRYTRRKNRICYLQEIFSNEMAKVD | |
| | DSFFHRLEESFLVEEDKKHERHPIFGNIVDEVAYHEKYPTIYHLRKKLVDSTDKADLRL | |
| | IYLALAHMIKFRGHFLIEGDLNPDNSDVDKLFIQLVQTYNQLFEENPINASGVDAKAIL | |
| | SARLSKSRRLENLIAQLPGEKKNGLFGNLIALSLGLTPNFKSNFDLAEDAKLQLSKDTY | |
| | DDDLDNLLAQIGDQYADLFLAAKNLSDAILLSDILRVNTEITKAPLSASMIKRYDEHHQ | |
| | DLTLLKALVRQQLPEKYKEIFFDQSKNGYAGYIDGGASQEEFYKFIKPILEKMDGTEEL | |
| | LVKLNREDLLRKQRTFDNGSIPHQIHLGELHAILRRQEDFYPFLKDNREKIEKILTFRIPY | |
| | YVGPLARGNSRFAWMTRKSEETITPWNFEEVVDKGASAQSFIERMTNFDKNLPNEKV | |
| | LPKHSLLYEYFTVYNELTKVKYVTEGMRKPAFLSGEQKKAIVDLLFKTNRKVTVKOL | |
| | KEDYFKKIECFDSVEISGVEDRFNASLGTYHDLLKIIKDKDELDNEENEDILEDIVLTLT | |
| | LFEDREMIEERLKTYAHLFDDKVMKOLKRRRYTGWGRLSRKLINGIRDKQSGKTILDF | |
| | LKSDGFANRNFMQLIHDDSLTFKEDIQKAQVSGQGDSLHEHIANLAGSPAIKKGILQTV | |
| | KVVDELVKVMGRHKPENIVIEMARENQTTQKGQKNSRERMKRIEEGIKELGSQILKEH | |
| | PVENTQLQNEKLYLYYLQNGRDMYVDQELDINRLSDYDVDHIVPQSFLKDDSIDNKV | |
| | LTRSDKNRGKSDNVPSEEVVKKMKNYWRQLLNAKLITORKFDNLTKAERGGLSELD | |
| | KAGFIKRQLVETRQITKHVAQILDSRMNTKYDENDKLIREVKVITLKSKLVSDFRKDFQ | |
| | FYKVREINNYHHAHDAYLNAVVGTALIKKYPKLESEFVYGDYKVYDVRKMIAKSEQE | |
| | IGKATAKYFFYSNIMNFFKTEITLANGEIRKRPLIETNGETGEIVWDKGRDFATVRKVL | |
| | SMPQVNIVKKTEVQTGGFSKESILPKRNSDKLIARKKDWDPKKYGGFDSPTVAYSVLV | |
| | VAKVEKGKSKKLKSVKELLGITIMERSSFEKNPIDFLEAKGYKEVKKDLIIKLPKYSLFE | |
| | LENGRKRMLASAGELOKGNELALPSKYVNFLYLASHYEKLKGS | |
| CP1300 | KPIREQAENIIHLFTLTNLGAPAAFKYFDTTIDRKRYTSTKEVLDATLIHQSITGLYETRI | 58 |
| | DLSQLGGDGGSGGSGGSGGSGGSGGSGGDKKYSIGLAIGTNSVGWAVITDEYKVPSK | |
| | KFKVLGNTDRHSIKKNLIGALLFDSGETAEATRLKRTARRRYTRRKNRICYLQEIFSNE | |
| | MAKVDDSFFHRLEESELVEEDKKHERHPIFGNIVDEVAYHEKYPTIYHLRKKLVDSTD | |
| | KADLRLIYLALAHMIKFRGHFLIEGDLNPDNSDVDKLFIQLVQTYNQLFEENPINASGV | |
| | DAKAILSARLSKSRRLENLIAQLPGEKKNGLFGNLIALSLGLTPNFKSNFDLAEDAKLQ | |
| | LSKDTYDDDLDNLLAQIGDQYADLFLAAKNLSDAILLSDILRVNTEITKAPLSASMIKR | |
| | YDEHHQDLTLLKALVRQQLPEKYKEIFFDQSKNGYAGYIDGGASQEEFYKFIKPILEK | |
| | MDGTEELLVKLNREDLLRKQRTFDNGSIPHQIHLGELHAILRRQEDFYPFLKDNREKIE | |
| | KILTFRIPYYVGPLARGNSRFAWMTRKSEETITPWNFEEVVDKGASAQSFIERMTNEDK | |
| | NLPNEKVLPKHSLLYEYFTVYNELTKVKYVTEGMRKPAFLSGEQKKAIVDLLFKTNR | |
| | KVTVKOLKEDYFKKIECFDSVEISGVEDRENASLGTYHDLLKIIKDKDFLDNEENEDIL | |
| | EDIVLTLTLFEDREMIEERLKTYAHLEDDKVMKOLKRRRYTGWGRLSRKLINGIRDKQ | |
| | SGKTILDFLKSDGFANRNFMQLIHDDSLTFKEDIQKAQVSGQGDSLHEHIANLAGSPAI | |
| | KKGILQTVKVVDELVKVMGRHKPENIVIEMARENQTTQKGQKNSRERMKRIEEGIKE | |
| | LGSQILKEHPVENTQLQNEKLYLYYLQNGRDMYVDQELDINRLSDYDVDHIVPQSFLK | |
| | DDSIDNKVLTRSDKNRGKSDNVPSEEVVKKMKNYWROLLNAKLITQRKFDNLTKAE | |
| | RGGLSELDKAGFIKRQLVETROITKHVAQILDSRMNTKYDENDKLIREVKVITLKSKLV | |
| | SDFRKDFQFYKVREINNYHHAHDAYLNAVVGTALIKKYPKLESEFVYGDYKVYDVR | |
| | KMIAKSEQEIGKATAKYFFYSNIMNFFKTEITLANGEIRKRPLIETNGETGEIVWDKGR | |
| | DFATVRKVLSMPQVNIVKKTEVQTGGFSKESILPKRNSDKLIARKKDWDPKKYGGEDS | |
| | PTVAYSVLVVAKVEKGKSKKLKSVKELLGITIMERSSFEKNPIDFLEAKGYKEVKKDLI | |
| | IKLPKYSLFELENGRKRMLASAGELQKGNELALPSKYVNFLYLASHYEKLKGSPEDNE | |
| | QKQLFVEQHKHYLDEIIEQISEFSKRVILADANLDKVLSAYNKHRD | |

[0417] The Cas9 circular permutants may be useful in the prime editing constructs utilized in the methods and compositions described herein. Exemplary C-terminal fragments of Cas9, based on the Cas9 of SEQ ID NO: 2, which may be rearranged to an N-terminus of Cas9, are provided below. It should be appreciated that such C-terminal fragments of Cas9 are exemplary and are not meant to be limiting. These exemplary CP-Cas9 fragments have the following sequences:

| | | SEQ |
|---|---|---|
| CP name | Sequence | ID NO: |
| CP1012 | DYKVYDVRKMIAKSEQEIGKATAKYFFYSN | 59 |
| C- | IMNFFKTEITLANGEIRKRPLIETNGETGE | |
| terminal | IVWDKGRDFATVRKVLSMPQVNIVKKTEVQ | |
| fragment | TGGFSKESILPKRNSDKLIARKKDWDPKKY | |
| | GGFDSPTVAYSVLVVAKVEKGKSKKLKSVK | |
| | ELLGITIMERSSFEKNPIDFLEAKGYKEVK | |
| | KDLIIKLPKYSLFELENGRKRMLASAGELQ | |
| | KGNELALPSKYVNFLYLASHYEKLKGSPED | |
| | NEQKQLFVEQHKHYLDEIIEQISEFSKRVI | |
| | LADANLDKVLSAYNKHRDKPIREQAENIIH | |
| | LFTLTNLGAPAAFKYFDTTIDRKRYTSTKE | |
| | VLDATLIHQSITGLYETRIDLSQLGGD | |
| CP1028 | EIGKATAKYFFYSNIMNFFKTEITLANGEI | 60 |
| C- | RKRPLIETNGETGEIVWDKGRDFATVRKVL | |
| terminal | SMPQVNIVKKTEVQTGGFSKESILPKRNSD | |
| fragment | KLIARKKDWDPKKYGGEDSPTVAYSVLVVA | |
| | KVEKGKSKKLKSVKELLGITIMERSSFEKN | |
| | PIDFLEAKGYKEVKKDLIIKLPKYSLFELE | |
| | NGRKRMLASAGELQKGNELALPSKYVNFLY | |
| | LASHYEKLKGSPEDNEQKQLFVEQHKHYLD | |
| | EIIEQISEFSKRVILADANLDKVLSAYNKH | |
| | RDKPIREQAENIIHLFTLINLGAPAAFKYF | |
| | DTTIDRKRYTSTKEVLDATLIHQSITGLYE | |
| | TRIDLSQLGGD | |
| CP1041 | NIMNFFKTEITLANGEIRKRPLIETNGETG | 61 |
| C- | EIVWDKGRDFATVRKVLSMPQVNIVKKTEV | |
| terminal | QTGGFSKESILPKRNSDKLIARKKDWDPKK | |
| fragment | YGGFDSPTVAYSVLVVAKVEKGKSKKLKSV | |
| | KELLGITIMERSSFEKNPIDFLEAKGYKEV | |
| | KKDLIIKLPKYSLFELENGRKRMLASAGEL | |
| | QKGNELALPSKYVNFLYLASHYEKLKGSPE | |
| | DNEQKQLFVEQHKHYLDEIIEQISEFSKRV | |
| | ILADANLDKVLSAYNKHRDKPIREQAENII | |
| | HLFTLTNLGAPAAFKYEDTTIDRKRYTSTK | |
| | EVLDATLIHQSITGLYETRIDLSQLGGD | |
| CP1249 | PEDNEQKQLFVEQHKHYLDEIIEQISEFSK | 62 |
| C- | RVILADANLDKVLSAYNKHRDKPIREQAEN | |
| terminal | IHLFTLTNLGAPAAFKYFDTTIDRKRYTST | |
| fragment | KEVLDATLIHQSITGLYETRIDLSQLGGD | |
| CP1300 | KPIREQAENIIHLFTLTNLGAPAAFKYFDT | 63 |
| C- | TIDRKRYTSTKEVLDATLIHQSITGLYETR | |
| terminal | IDLSQLGGD | |
| fragment | | |

I, Cas9 Variants with Modified PAM Specificities

[0418] The prime editors utilized in the methods and compositions of the present disclosure may also comprise Cas9 variants with modified PAM specificities. Some aspects of this disclosure provide Cas9 proteins that exhibit activity on a target sequence that does not comprise the canonical PAM (5′-NGG-3′, where N is A, C. G, or T) at its 3′-end. In some embodiments, the Cas9 protein exhibits activity on a target sequence comprising a 5′-NGG-3′ PAM sequence at its 3′-end. In some embodiments, the Cas9 protein exhibits activity on a target sequence comprising a 5′-NNG-3′ PAM sequence at its 3′-end. In some embodiments, the Cas9 protein exhibits activity on a target sequence comprising a 5′-NNA-3′ PAM sequence at its 3′-end. In some embodiments, the Cas9 protein exhibits activity on a target sequence comprising a 5′-NNC-3′ PAM sequence at its 3′-end. In some embodiments, the Cas9 protein exhibits activity on a target sequence comprising a 5′-NNT-3′ PAM sequence at its 3′-end. In some embodiments, the Cas9 protein exhibits activity on a target sequence comprising a 5′-NGT-3′ PAM sequence at its 3′-end. In some embodiments, the Cas9 protein exhibits activity on a target sequence comprising a 5′-NGA-3′ PAM sequence at its 3′-end. In some embodiments, the Cas9 protein exhibits activity on a target sequence comprising a 5′-NGC-3′ PAM sequence at its 3′-end. In some embodiments, the Cas9 protein exhibits activity on a target sequence comprising a 5′-NAA-3′ PAM sequence at its 3′-end. In some embodiments, the Cas9 protein exhibits activity on a target sequence comprising a 5′-NAC-3′ PAM sequence at its 3′-end. In some embodiments, the Cas9 protein exhibits activity on a target sequence comprising a 5′-NAT-3′ PAM sequence at its 3′-end. In still other embodiments, the Cas9 protein exhibits activity on a target sequence comprising a 5′-NAG-3′ PAM sequence at its 3′-end.

[0419] It should be appreciated that any of the amino acid mutations described herein, (e.g., A262T) from a first amino acid residue (e.g., A) to a second amino acid residue (e.g., T) may also include mutations from the first amino acid residue to an amino acid residue that is similar to (e.g., conserved) the second amino acid residue. For example, mutation of an amino acid with a hydrophobic side chain (e.g., alanine, valine, isoleucine, leucine, methionine, phenylalanine, tyrosine, or tryptophan) may be a mutation to a second amino acid with a different hydrophobic side chain (e.g., alanine, valine, isoleucine, leucine, methionine, phenylalanine, tyrosine, or tryptophan). For example, a mutation of an alanine to a threonine (e.g., a A262T mutation) may also be a mutation from an alanine to an amino acid that is similar in size and chemical properties to a threonine, for example, serine. As another example, mutation of an amino acid with a positively charged side chain (e.g., arginine, histidine, or lysine) may be a mutation to a second amino acid with a different positively charged side chain (e.g., arginine, histidine, or lysine). As another example, mutation of an amino acid with a polar side chain (e.g., serine, threonine, asparagine, or glutamine) may be a mutation to a second amino acid with a different polar side chain (e.g., serine, threonine, asparagine, or glutamine). Additional similar amino acid pairs include, but are not limited to, the following: phenylalanine and tyrosine; asparagine and glutamine; methionine and cysteine; aspartic acid and glutamic acid; and arginine and lysine. The skilled artisan would recognize that such conservative amino acid substitutions will likely have minor effects on protein structure and are likely to be well tolerated without compromising function. In some embodiments, any amino of the amino acid mutations provided herein from one amino acid to a threonine may be an amino acid mutation to a serine. In some embodiments, any amino of the amino acid mutations provided herein from one amino acid to an arginine may be an amino acid mutation to a lysine. In some embodiments, any amino of the amino acid mutations provided herein from one amino acid to an isoleucine, may be an amino acid mutation to an alanine, valine, methionine, or leucine. In some embodiments, any amino of the amino acid mutations provided herein from one amino acid to a lysine may be an amino acid mutation to an arginine. In some embodiments, any amino of the amino acid mutations provided herein from one amino acid to an aspartic acid may be an amino acid mutation to a glutamic acid or asparagine. In some embodiments, any amino of the amino acid mutations provided herein from one amino acid to a valine may be an amino acid mutation to an alanine, isoleucine, methionine, or leucine. In some embodiments, any amino of the amino acid mutations provided herein from one amino acid to a glycine may be an amino acid mutation to an alanine. It should be appreciated, however, that additional conserved amino acid residues would be recognized by the skilled artisan and any of the amino acid mutations to other conserved amino acid residues are also within the scope of this disclosure.

[0420] In some embodiments, the Cas9 protein comprises a combination of mutations that exhibit activity on a target sequence comprising a 5′-NAA-3′ PAM sequence at its 3′-end. In some embodiments, the combination of mutations are present in any one of the clones listed in Table 1. In some embodiments, the combination of mutations are conservative mutations of the clones listed in Table 1. In some embodiments, the Cas9 protein comprises the combination of mutations of any one of the Cas9 clones listed in Table 1.

TABLE 1

NAA PAM Clones
Mutations from wild-type SpCas9 (e.g., SEQ ID NO: 2)
D177N, K218R, D614N, D1135N, P1137S,
E1219V, A1320V, A1323D, R1333K
D177N, K218R, D614N, D1135N, E1219V,
Q1221H, H1264Y, A1320V, R1333K
A10T, I322V, S409I, E427G, G715C, D1135N,
E1219V, Q1221H, H1264Y, A1320V, R1333K
A367T, K710E, R1114G, D1135N, P1137S, E1219V,
Q1221H, H1264Y, A1320V, R1333K
A10T, I322V, S409I, E427G, R753G, D861N, D1135N,
K1188R, E1219V, Q1221H, H1264H, A1320V,
R1333K
A10T, I322V, S409I, E427G, R654L, V743I, R753G,
M1021T, D1135N, D1180G, K1211R, E1219V, Q1221H,
H1264Y, A1320V, R1333K
A10T, I322V, S409I, E427G, V743I, R753G, E762G,
D1135N, D1180G, K1211R, E1219V, Q1221H, H1264Y,
A1320V, R1333K
A10T, I322V, S409I, E427G, R753G, D1135N, D1180G,
K1211R, E1219V, Q1221H, H1264Y, S1274R,
A1320V, R1333K
A10T, I322V, S409I, E4270, A589S, R753G, D1135N,
E1219V, Q1221H, H1264H, A1320V, R1333K
A10T, I322V, S409I, E427G, R753G, E757K, G865G,
D1135N, E1219V, Q1221H, H1264Y, A1320V, R1333K
A10T, I322V, S409I, E427G, R654L, R753G, E757K,
D1135N, E1219V, Q1221H, H1264Y, A1320V, R1333K
A10T, I322V, S409I, E427G, K599R, M631A, R654L,
K673E, V743I, R753G, N758H, E762G, D1135N,
D1180G, E1219V, Q1221H, Q1256R, H1264Y,
A1320V, A1323D, R1333K
A10T, I322V, S409I, E4270, R654L, K673E, V743I,
R753G, E762G, N869S, N1054D, R1114G, D1135N,
D1180G, E1219V, Q1221H, H1264Y, A1320V,
A1323D, R1333K
A10T, I322V, S409I, E4270, R654L, L727I, V743I,
R753G, E762G, R859S, N946D, F1134L, D1135N,
D1180G, E1219V, Q1221H, H1264Y, N1317T,
A1320V, A1323D, R1333K
A10T, I322V, S409I, E427G, R654L, K673E, V743I,
R753G, E762G, N803S, N869S, Y1016D, G1077D,
RI114G, F1134L, D1135N, DI180G, E1219V, Q1221H,
H1264Y, V1290G, L1318S, A1320V, A1323D,
R1333K
A10T, I322V, S409I, E427G, R654L, K673E, V743I,
R753G, E762G, N803S, N869S, Y1016D, G1077D,
R1114G, F1134L, D1135N, K1151E, D1180G, E1219V,
Q1221H, H1264Y, V1290G, L1318S, A1320V,
R1333K
A10T, I322V, S409I, E427G, R654L, K673E, V743I,
R753G, E762G, N803S, N869S, Y1016D, G1077D,
R1114G, F1134L, D1135N, D1180G, E1219V, Q1221H,
H1264Y, V1290G, L1318S, A1320V, A1323D,
R1333K
A10T, I322V, S409I, E427G, R654L, K673E, F693L,
V743I, R753G, E762G, N803S, N869S, L921P, Y1016D,
G1077D, F1080S, R1114G, D1135N, D1180G, E1219V,
Q1221H, H1264Y, L1318S, A1320V, A1323D,
R1333K
A10T, I322V, S409I, E427G, E630K, R654L, K673E,
V743I, R753G, E762G, Q768H, N803S, N869S, Y1016D,
G1077D, R1114G, F1134L, D1135N, D1180G, E1219V,
Q1221H, H1264Y, L1318S, A1320V, R1333K
A10T, I322V, S409I, E427G, R654L, K673E, F693L,
V743I, R753G, E762G, Q768H, N803S, N869S, Y1016D,
G1077D, R1114G, F1134L, D1135N, D1180G, E1219V,
Q1221H, G1223S, H1264Y, L1318S, A1320V,
R1333K
A10T, I322V, S409I, E427G, R654L, K673E, F693L,
V743I, R753G, E762G, N803S, N869S, L921P, Y1016D,
G1077D, F1801S, R1114G, D1135N, D1180G, E1219V,
Q1221H, H1264Y, L1318S, A1320V, A1323D,
R1333K
A10T, I322V, S409I, E427G, R654L, V743I, R753G,
M1021T, D1135N, D1180G, K1211R, E1219V, Q1221H,
H1264Y, A1320V, R1333K
A10T, I322V, S409I, E427G, R654L, K673E, V743I,
R753G, E762G, M673I, N803S, N869S, G1077D, R1114G,
D1135N, V1139A, D1180G, E1219V, Q1221H,
A1320V, R1333K
A10T, I322V, S409I, E427G, R654L, K673E, V743I,
R753G, E762G, N8038, N869S, R1114G, D1135N,
E1219V, Q1221H, A1320V, R1333K

[0421] In some embodiments, the Cas9 protein comprises an amino acid sequence that is at least 80% identical to the amino acid sequence of a Cas9 protein as provided by any one of the variants of Table 1. In some embodiments, the Cas9 protein comprises an amino acid sequence that is at least 85%, at least 90%, at least 92%, at least 95%, at least 96%, at least 97%, at least 98%, at least 99%, or at least 99.5% identical to the amino acid sequence of a Cas9 protein as provided by any one of the variants of Table 1.

[0422] In some embodiments, the Cas9 protein exhibits an increased activity on a target sequence that does not comprise the canonical PAM (5′-NGG-3′) at its 3′ end as compared to Streptococcus pyogenes Cas9 as provided by SEQ ID NO: 2. In some embodiments, the Cas9 protein exhibits an activity on a target sequence having a 3′ end that is not directly adjacent to the canonical PAM sequence (5′-NGG-3′) that is at least 5-fold increased as compared to the activity of Streptococcus pyogenes Cas9 as provided by SEQ ID NO: 2 on the same target sequence. In some embodiments, the Cas9 protein exhibits an activity on a target sequence that is not directly adjacent to the canonical PAM sequence (5′-NGG-3′) that is at least 10-fold, at least 50-fold, at least 100-fold, at least 500-fold, at least 1,000-fold, at least 5,000-fold, at least 10,000-fold, at least 50,000-fold, at least 100.000-fold, at least 500,000-fold, or at least 1,000,000-fold increased as compared to the activity of Streptococcus pyogenes as provided by SEQ ID NO: 2 on the same target sequence. In some embodiments, the 3′ end of the target sequence is directly adjacent to an AAA, GAA, CAA, or TAA sequence. In some embodiments, the Cas9 protein comprises a combination of mutations that exhibit activity on a target sequence comprising a 5′-NAC-3′ PAM sequence at its 3′-end. In some embodiments, the combination of mutations are present in any one of the clones listed in Table 2. In some embodiments, the combination of mutations are conservative mutations of the clones listed in Table 2. In some embodiments, the Cas9 protein comprises the combination of mutations of any one of the Cas9 clones listed in Table 2.

TABLE 2

NAC PAM Clones
Mutations from wild-type SpCas9 (e.g., SEQ ID NO: 2)
T472I, R753G, K890E, D1332N, R1335Q, T1337N
I1057S, D1135N, P1301S. R1335Q, T1337N
T472I, R753G, D1332N, R1335Q, T1337N
D1135N, E1219V, D1332N, R1335Q, T1337N
T472I, R753G, K890E, D1332N, R1335Q, T1337N
I1057S, D1135N, P1301S, R1335Q, T1337N
T472I, R753G, D1332N, R1335Q, T1337N
T472I, R753G, Q771H, D1332N, R1335Q, T1337N
E627K, T638P, K652T, R753G, N803S, K959N, R1114G,
D1135N, E1219V, D1332N, R1335Q, T1337N
E627K, T638P, K652T, R753G, N803S, K959N,
R1114G, D1135N, K1156E, E1219V, D1332N, R1335Q,
T1337N
E627K, T638P, V647I, R753G, N803S, K959N, G1030R,
I1055E, R1114G, D1135N, E1219V, D1332N,
R1335Q, T1337N
E627K, E630G, T638P, V647A, G687R, N767D, N803S,
K959N, R1114G, D1135N, E1219V, D1332G, R1335Q,
T1337N
E627K, T638P, R753G, N803S, K959N, R1114G,
D1135N, E1219V, N1266H, D1332N, R1335Q, T1337N
E627K, T638P, R753G, N803S, K959N, I1057T,
R1114G, D1135N, E1219V, D1332N, R1335Q, T1337N
E627K, T638P, R753G, N803S, K959N, R1114G,
D1135N, E1219V, D1332N, R1335Q, T1337N
E627K, M631I, T638P, R753G, N803S, K959N, Y1036H,
R1114G, D1135N, E1219V, D1251G, D1332G,
R1335Q, T1337N
E627K, T638P, R753G, N803S, V875I, K959N, Y1016C,
R1114G, D1135N, E1219V, D1251G, D1332G,
R1335Q, T1337N, I1348V
K608R, E627K, T638P, V647I, R654L, R7530, N803S,
T804A, K848N, V922A, K959N, R1114G, D1135N,
E1219V, D1332N, R1335Q, T1337N
K608R, E627K, T638P, V647I, R753G, N803S, V922A,
K959N, K1014N, V1015A, R1114G, D1135N, K1156N,
E1219V, N1252D, D1332N, R1335Q, T1337N
K608R, E627K, R629G, T638P, V647I, A711T, R753G,
K775R, K789E, N803S, K959N, V1015A, Y1036H, R1114G,
D1135N, E1219V, N1286H, D1332N, R1335Q, T1337N
K608R, E627K, T638P, V647I, T740A, R753G, N803S,
K948E, K959N, Y1016S, R1114G, D1135N, E1219V,
N1286H, D1332N, R1335Q, T1337N
K608R, E627K, T638P, V647I, T740A, N803S, K948E,
K959N, Y1016S, R1114G, D1135N, E1219V, N1286H,
D1332N, R1335Q, T1337N
I670S, K608R, E627K, E630G, T638P, V647I, R653K,
R753G, I795L, K797N, N803S, K866R, K890N, K959N,
Y1016C, R1114G, D1135N, E1219V, D1332N, R1335Q, T1337N
K608R, E627K, T638P, V647I, T740A, G752R, R753G,
K797N, N803S, K948E, K959N, V1015A, Y1016S,
R1114G, D1135N, E1219V, N1266H, D1332N, R1335Q, T1337N
I570T, A589V, K608R, E627K, T638P, V647I, R654L,
Q716R, R753G, N803S, K948E, K959N, Y1016S,
R1114G, D1135N, E1207G, E1219V, N1234D,
D1332N, R1335Q, T1337N
K608R, E627K, R629G, T638P, V647I, R654L, Q740R,
R753G, N803S, K959N, N990S, T995S, V1015A,
Y1036D, R1114G, D1135N, E1207G, E1219V,
N1234D, N1266H, D1332N, R1335Q, T1337N
I562F, V565D, I570T, K608R, L625S, E627K, T638P,
V647I, R654I, G752R, R753G, N803S, N808D, K959N,
M1021L, R1114G, D1135N, N1177S, N1234D,
D1332N, R1335Q, T1337N
I562F, I570T, K608R, E627K, T638P, V647I, R753G,
E790A, N803S, K959N, V1015A, Y1036H, R1114G,
D1135N, DI180E, A1184T, E1219V, D1332N, R1335Q, T1337N
I570T, K608R, E627K, T638P, V647I, R654H, R753G,
E790A, N803S, K959N, V1015A, R1114G, D1127A,
D1135N, E1219V, D1332N, R1335Q, T1337N
I570T, K608R, L625S, E627K, T638P, V647I, R654I,
T703P, R753G, N803S, N808D, K959N, M1021L,
R1114G, D1135N, E1219V, D1332N, R1335Q, T1337N
I570S, K608R, E627K, E630G, T638P, V647I, R653K,
R7530, I795L, N803S, K866R, K890N, K959N, Y1016C,
R1114G, D1135N, E1219V, D1332N, R1335Q, T1337N
I570T, K608R, E627K, T638P, V647I, R654H, R753G,
E790A, N803S, K959N, V1016A, R1114G, D1135N,
E1219V, K1246E, D1332N, R1335Q, T1337N
K608R, E627K, T638P, V647I, R654L, K673E, R753G,
E790A, N803S, K948E, K959N, R1114G, D1127G, D1135N,
D1180E, E1219V, N1286H, D1332N, R1335Q, T1337N
K608R, L625S, E627K, T638P, V647I, R654I, I670T,
R753G, N803S, N808D, K959N, M1021L, R1114G,
D1135N, E1219V, N1286H, D1332N, R1335Q, T1337N
E627K, M631V, T638P, V647I, K710E, R753G, N803S,
N808D, K948E, M1021L, R1114G, D1135N, E1219V,
D1332N, R1335Q, T1337N, S1338T, H1349R

[0423] In some embodiments, the Cas9 protein comprises an amino acid sequence that is at least 80% identical to the amino acid sequence of a Cas9 protein as provided by any one of the variants of Table 2. In some embodiments, the Cas9 protein comprises an amino acid sequence that is at least 85%, at least 90%, at least 92%, at least 95%, at least 96%, at least 97%, at least 98%, at least 99%, or at least 99.5% identical to the amino acid sequence of a Cas9 protein as provided by any one of the variants of Table 2.

[0424] In some embodiments, the Cas9 protein exhibits an increased activity on a target sequence that does not comprise the canonical PAM (5′-NGG-3′) at its 3′ end as compared to Streptococcus pyogenes Cas9 as provided by SEQ ID NO: 2. In some embodiments, the Cas9 protein exhibits an activity on a target sequence having a 3′ end that is not directly adjacent to the canonical PAM sequence (5′-NGG-3′) that is at least 5-fold increased as compared to the activity of Streptococcus pyogenes Cas9 as provided by SEQ ID NO: 2 on the same target sequence. In some embodiments, the Cas9 protein exhibits an activity on a target sequence that is not directly adjacent to the canonical PAM sequence (5′-NGG-3′) that is at least 10-fold, at least 50-fold, at least 100-fold, at least 500-fold, at least 1.000-fold, at least 5,000-fold, at least 10,000-fold, at least 50,000-fold, at least 100.000-fold, at least 500,000-fold, or at least 1,000,000-fold increased as compared to the activity of Streptococcus pyogenes as provided by SEQ ID NO: 2 on the same target sequence. In some embodiments, the 3′ end of the target sequence is directly adjacent to an AAC, GAC, CAC, or TAC sequence.

[0425] In some embodiments, the Cas9 protein comprises a combination of mutations that exhibit activity on a target sequence comprising a 5′-NAT-3′ PAM sequence at its 3′-end. In some embodiments, the combination of mutations are present in any one of the clones listed in Table 3. In some embodiments, the combination of mutations are conservative mutations of the clones listed in Table 3. In some embodiments, the Cas9 protein comprises the combination of mutations of any one of the Cas9 clones listed in Table 3.

TABLE 3

NAT PAM Clones
Mutations from wild-type SpCas9 (e.g., SEQ ID NO: 2)
K961E, H985Y, D1135N, K1191N, E1219V,
Q1221H, A1320A, P1321S, R1335L
D1135N, G1218S, E1219V, Q1221H,
P1249S, P1321S, D1322G, R1335L
V743I, R753G, E790A, D1135N, G1218S, E1219V,
Q1221H, A1227V, P1249S, N1286K, A1293T, P1321S,
D1322G, R1335L, T1339I
F575S, M631L, R654L, V748I, V743I, R753G, D853E,
V922A, R1114G D1135N, G1218S, E1219V, Q1221H,
A1227V, P1249S, N1286K, A1293T,
P1321S, D1322G, R1335L, T1339I
F575S, M631L, R654L, R664K, R753G, D853E,
V922A, R1114G D1135N, D1180G, G1218S, E1219V,
Q1221H, P1249S, N1286K, P1321S, D1322G, R1335L
M631L, R654L, R753G, K797E, D853E, V922A,
D1012A, R1114G D1135N, G1218S, E1219V, Q1221H,
P1249S, N1317K, P1321S, D1322G, R1335L
F575S, M631L, R654L, R664K, R753G, D853E,
V922A, R1114G, Y1131C, D1135N, D1180G, G1218S,
E1219V, Q1221H, P1249S, P1321S, D1322G, R1335L
F575S, M631L, R654L, R664K, R753G, D853E,
V922A, R1114G, Y1131C, D1135N, DI180G, G1218S,
E1219V, Q1221H, P1249S, P1321S, DI322G, R1335L
F575S, D596Y, M631L, R654L, R664K, R753G, D853E,
V922A, R1114G, Y1131C, D1135N, D1180G, G1218S,
E1219V, Q1221H, P1249S, Q1256R, P1321S, D1322G, R1335L
F575S, M631L, R654L, R664K, K710E, V750A, R753G,
D853E, V922A, R1114G, Y1131C, D1135N, D1180G,
G1218S, E1219V, Q1221H, P1249S, P1321S, D1322G, R1335L
F575S, M631L, K649R, R654L, R664K, R753G, D853E,
V922A, R1114G, Y1131C, D1135N, K1156E, D1180G,
G1218S, E1219V, Q1221H, P1249S, P1321S, D1322G, R1335L
F575S, M631L, R654L, R664K, R753G, D853E,
V922A, R1114G, Y1131C, D1135N, DI180G, G1218S,
E1219V, Q1221H, P1249S, P1321S, DI322G, R1335L
F575S, M631L, R654L, R664K, R753G, D853E,
V922A, I1057G, R1114G, Y1131C, D1135N, D1180G,
G1218S, E1219V, Q1221H, P1249S,
N1308D, P1321S, D1322G, R1335L
M631L, R654L, R753G, D853E, V922A, R1114G,
Y1131C, D1135N, E1150V, D1180G, G1218S, E1219V,
Q1221H, P1249S, P1321S, D1332G, R1335L
M631L, R654L, R664K, R753G, D853E, I1057V,
Y1131C, D1135N, D1180G, G1218S, E1219V, Q1221H,
P1249S, P1321S, D1332G, R1335L
M631L, R654L, R664K, R753G, I1057V, R1114G, Y1131C,
D1135N, D1180G, G1218S, E1219V, Q1221H,
P1249S, P1321S, D1332G, R1335L

[0426] The above description of various napDNAbps which can be used in connection with the prime editors is not meant to be limiting in any way. The prime editors may comprise the canonical SpCas9, or any ortholog Cas9 protein, or any variant Cas9 protein-including any naturally occurring variant, mutant, or otherwise engineered version of Cas9—that is known or which can be made or evolved through a directed evolutionary or otherwise mutagenic process. In various embodiments, the Cas9 or Cas9 variants have a nickase activity, i.e., only cleave of strand of the target DNA sequence. In other embodiments, the Cas9 or Cas9 variants have inactive nucleases, i.e., are “dead” Cas9 proteins. Other variant Cas9 proteins that may be used are those having a smaller molecular weight than the canonical SpCas9 (e.g., for easier delivery) or having modified or rearranged primary amino acid structure (e.g., the circular permutant formats). The prime editors utilized in the methods and compositions described herein may also comprise Cas9 equivalents, including Cas12a/Cpf1 and Cas12b proteins which are the result of convergent evolution. The napDNAbps used herein (e.g., SpCas9, Cas9 variant, or Cas9 equivalents) may also contain various modifications that alter/enhance their PAM specificities. Lastly, the application contemplates any Cas9, Cas9 variant, or Cas9 equivalent which has at least 70%, at least 75%, at least 80%, at least 85%, at least 90%, at least 91%, at least 92%, at least 93%, at least 94%, at least 95%, at least 96%, at least 97%, at least 98%, at least 99%, or at least 99.9% sequence identity to a reference Cas9 sequence, such as a references SpCas9 canonical sequences or a reference Cas9 equivalent (e.g., Cas12a/Cpf1). In a particular embodiment, the Cas9 variant having expanded PAM capabilities is SpCas9 (H840A) VRQR (SEQ ID NO: 64), which has the following amino acid sequence (with the V, R, Q. R substitutions relative to the SpCas9 (H840A) of SEQ ID NO: 33 being show in bold underline. In addition, the methionine residue in SpCas9 (H840) was removed for SpCas9 (H840A) VRQR):

(SEQ ID NO: 64)
DKKYSIGLDIGTNSVGWAVITDEYKVPSKKFKVLGNTDRHSIKKNLIGALLFDSGETAEATRLKRTARRRY
TRRKNRICYLQEIFSNEMAKVDDSFFHRLEESELVEEDKKHERHPIFGNIVDEVAYHEKYPTIYHLRKKLVD
STDKADLRLIYLALAHMIKFRGHFLIEGDLNPDNSDVDKLFIQLVQTYNQLFEENPINASGVDAKAILSARLS
KSRRLENLIAQLPGEKKNGLFGNLIALSLGLTPNFKSNFDLAEDAKLQLSKDTYDDDLDNLLAQIGDQYAD
LFLAAKNLSDAILLSDILRVNTEITKAPLSASMIKRYDEHHQDLTLLKALVRQQLPEKYKEIFFDQSKNGYA
GYIDGGASQEEFYKFIKPILEKMDGTEELLVKLNREDLLRKQRTFDNGSIPHQIHLGELHAILRRQEDFYPFL
KDNREKIEKILTFRIPYYVGPLARGNSRFAWMTRKSEETITPWNFEEVVDKGASAQSFIERMTNEDKNLPNE
KVLPKHSLLYEYFTVYNELTKVKYVTEGMRKPAFLSGEQKKAIVDLLFKTNRKVTVKQLKEDYFKKIECF
DSVEISGVEDRFNASLGTYHDLLKIIKDKDFLDNEENEDILEDIVLTLTLFEDREMIEERLKTYAHLFDDKVM
KQLKRRRYTGWGRLSRKLINGIRDKQSGKTILDELKSDGFANRNFMQLIHDDSLTFKEDIQKAQVSGQGDS
LHEHIANLAGSPAIKKGILQTVKVVDELVKVMGRHKPENIVIEMARENQTTQKGQKNSRERMKRIEEGIKE
LGSQILKEHPVENTQLQNEKLYLYYLQNGRDMYVDQELDINRLSDYDVDAIVPQSFLKDDSIDNKVLTRSD
KNRGKSDNVPSEEVVKKMKNYWRQLLNAKLITQRKFDNLTKAERGGLSELDKAGFIKRQLVETRQITKHV
AQILDSRMNTKYDENDKLIREVKVITLKSKLVSDFRKDFQFYKVREINNYHHAHDAYLNAVVGTALIKKYP
KLESEFVYGDYKVYDVRKMIAKSEQEIGKATAKYFFYSNIMNFFKTEITLANGEIRKRPLIETNGETGEIVW
DKGRDFATVRKVLSMPQVNIVKKTEVQTGGFSKESILPKRNSDKLIARKKDWDPKKYGGFVSPTVAYSVL
VVAKVEKGKSKKLKSVKELLGITIMERSSFEKNPIDFLEAKGYKEVKKDLIIKLPKYSLFELENGRKRMLAS
ARELQKGNELALPSKYVNFLYLASHYEKLKGSPEDNEQKQLFVEQHKHYLDEIIEQISEFSKRVILADANLD
KVLSAYNKHRDKPIREQAENIIHLFTLTNLGAPAAFKYFDTTIDRKQYRSTKEVLDATLIHQSITGLYETRID
LSQLGGD

[0427] In another particular embodiment, the Cas9 variant having expanded PAM capabilities is SpCas9 (H840A) VRER, which has the following amino acid sequence (with the V, R, E, R substitutions relative to the SpCas9 (H840A) of SEQ ID NO: 51 being shown in bold underline. In addition, the methionine residue in SpCas9 (H840) was removed for SpCas9 (H840A) VRER):

(SEQ ID NO: 65)
DKKYSIGLDIGTNSVGWAVITDEYKVPSKKFKVLGNTDRHSIKKNLIGALLFDSGETAEATRLKRTARRRY
TRRKNRICYLQEIFSNEMAKVDDSFFHRLEESFLVEEDKKHERHPIFGNIVDEVAYHEKYPTIYHLRKKLVD
STDKADLRLIYLALAHMIKFRGHFLIEGDLNPDNSDVDKLFIQLVQTYNQLFEENPINASGVDAKAILSARLS
KSRRLENLIAQLPGEKKNGLFGNLIALSLGLTPNFKSNFDLAEDAKLQLSKDTYDDDLDNLLAQIGDQYAD
LFLAAKNLSDAILLSDILRVNTEITKAPLSASMIKRYDEHHQDLTLLKALVRQQLPEKYKEIFFDQSKNGYA
GYIDGGASQEEFYKFIKPILEKMDGTEELLVKLNREDLLRKQRTFDNGSIPHQIHLGELHAILRRQEDFYPFL
KDNREKIEKILTFRIPYYVGPLARGNSRFAWMTRKSEETITPWNFEEVVDKGASAQSFIERMTNFDKNLPNE
KVLPKHSLLYEYFTVYNELTKVKYVTEGMRKPAFLSGEQKKAIVDLLFKTNRKVTVKQLKEDYFKKIECF
DSVEISGVEDRFNASLGTYHDLLKIIKDKDFLDNEENEDILEDIVLTLTLFEDREMIEERLKTYAHLEDDKVM
KQLKRRRYTGWGRLSRKLINGIRDKQSGKTILDELKSDGFANRNFMQLIHDDSLTFKEDIQKAQVSGQGDS
LHEHIANLAGSPAIKKGILQTVKVVDELVKVMQRHKPENIVIEMARENQTTQKGQKNSRERMKRIEEGIKE
LGSQILKEHPVENTQLQNEKLYLYYLQNGRDMYVDQELDINRLSDYDVDAIVPQSFLKDDSIDNKVLTRSD
KNRGKSDNVPSEEVVKKMKNYWRQLLNAKLITQRKFDNLTKAERGGLSELDKAGFIKRQLVETRQITKHV
AQILDSRMNTKYDENDKLIREVKVITLKSKLVSDFRKDFQFYKVREINNYHHAHDAYLNAVVGTALIKKYP
KLESEFVYGDYKVYDVRKMIAKSEQEIGKATAKYFFYSNIMNFFKTEITLANGEIRKRPLIETNGETGEIVW
DKGRDFATVRKVLSMPQVNIVKKTEVQTGGFSKESILPKRNSDKLIARKKDWDPKKYGGFVSPTVAYSVL
VVAKVEKGKSKKLKSVKELLGITIMERSSFEKNPIDFLEAKGYKEVKKDLIIKLPKYSLFELENGRKRMLAS
ARELQKGNELALPSKYVNFLYLASHYEKLKGSPEDNEQKQLFVEQHKHYLDEHIEQISEFSKRVILADANLD
KVLSAYNKHRDKPIREQAENIIHLFTLTNLGAPAAFKYFDTTIDRKEYRSTKEVLDATLIHQSITGLYETRID
LSQLGGD

[0428] In some embodiments, the napDNAbp that functions with a non-canonical PAM sequence is an Argonaute protein. One example of such a nucleic acid programmable DNA binding protein is an Argonaute protein from Natronobacterium gregoryi (NgAgo). NgAgo is a ssDNA-guided endonuclease. NgAgo binds 5′ phosphorylated ssDNA of ˜24 nucleotides (gDNA) to guide it to its target site and will make DNA double-strand breaks at the gDNA site. In contrast to Cas9, the NgAgo-gDNA system does not require a protospacer-adjacent motif (PAM). Using a nuclease inactive NgAgo (dNgAgo) can greatly expand the bases that may be targeted. The characterization and use of NgAgo have been described in Gao et al., Nat Biotechnol., 2016 July; 34(7):768-73. PubMed PMID: 27136078; Swarts et al., Nature. 507(7491) (2014):258-61; and Swarts et al., Nucleic Acids Res. 43(10) (2015):5120-9, each of which is incorporated herein by reference.

[0429] In some embodiments, the napDNAbp is a prokaryotic homolog of an Argonaute protein. Prokaryotic homologs of Argonaute proteins are known and have been described, for example, in Makarova K., et al., “Prokaryotic homologs of Argonaute proteins are predicted to function as key components of a novel system of defense against mobile genetic elements”, Biol Direct. 2009 Aug. 25; 4:29. doi: 10.1186/1745-6150-4-29, the entire contents of which is hereby incorporated by reference. In some embodiments, the napDNAbp is a Marinitoga piezophila Argonaute (MpAgo) protein. The CRISPR-associated Marinitoga piezophila Argonaute (MpAgo) protein cleaves single-stranded target sequences using 5′-phosphorylated guides. The 5′ guides are used by all known Argonautes. The crystal structure of an MpAgo-RNA complex shows a guide strand binding site comprising residues that block 5′ phosphate interactions. This data suggests the evolution of an Argonaute subclass with noncanonical specificity for a 5′-hydroxylated guide. See, e.g., Kaya et al., “A bacterial Argonaute with noncanonical guide RNA specificity”, Proc Natl Acad Sci USA. 2016 Apr. 12:113(15):4057-62, the entire contents of which are hereby incorporated by reference). It should be appreciated that other argonaute proteins may be used, and are within the scope of this disclosure.

[0430] Some aspects of the disclosure provide Cas9 domains that have different PAM specificities. Typically, Cas9 proteins, such as Cas9 from S. pyogenes (spCas9), require a canonical NGG PAM sequence to bind a particular nucleic acid region. This may limit the ability to edit desired bases within a genome. In some embodiments, the base editing fusion proteins provided herein may need to be placed at a precise location, for example where a target base is placed within a 4 base region (e.g., a “editing window”), which is approximately 15 bases upstream of the PAM. See Komor, A. C., et al., “Programmable editing of a target base in genomic DNA without double-stranded DNA cleavage” Nature 533, 420-424 (2016), the entire contents of which are hereby incorporated by reference. Accordingly, in some embodiments, any of the fusion proteins provided herein may contain a Cas9 domain that is capable of binding a nucleotide sequence that does not contain a canonical (e.g., NGG) PAM sequence, Cas9 domains that bind to non-canonical PAM sequences have been described in the art and would be apparent to the skilled artisan. For example, Cas9 domains that bind non-canonical PAM sequences have been described in Kleinstiver, B. P., et al., “Engineered CRISPR-Cas9 nucleases with altered PAM specificities” Nature 523, 481-485 (2015); and Kleinstiver, B. P., et al., “Broadening the targeting range of Staphylococcus aureus CRISPR-Cas9 by modifying PAM recognition” Nature Biotechnology 33, 1293-1298 (2015): the entire contents of each are hereby incorporated by reference.

[0431] For example, a napDNAbp domain with altered PAM specificity, such as a domain with at least 80%, at least 85%, at least 90%, at least 95%, or at least 99% sequence identity with wild type Francisella novicida Cpf1 (D917, E1006, and D1255) (SEQ ID NO: 66), which has the following amino acid sequence:

(SEQ ID NO: 66)
MSIYQEFVNKYSLSKTLRFELIPQGKTLENIKARGLILDDEKRAKDYKKAKQUIDKYHQFFIEEILSSVCISED
LLQNYSDVYFKLKKSDDDNLQKDFKSAKDTIKKQISEYIKDSEKFKNLFNQNLIDAKKGQESDLILWLKQS
KDNGIELFKANSDITDIDEALEIIKSFKGWTTYFKGFHENRKNVYSSNDIPTSIIYRIVDDNLPKFLENKAKYE
SLKDKAPEAINYEQIKKDLAEELTFDIDYKTSEVNQRVFSLDEVFEIANFNNYLNQSGITKENTIIGGKFVNG
ENTKRKGINEYINLYSQQINDKTLKKYKMSVLFKQILSDTESKSFVIDKLEDDSDVVTTMQSFYEQIAAFKT
VEEKSIKETLSLLFDDLKAQKLDLSKIYFKNDKSLTDLSQQVEDDYSVIGTAVLEYITQQIAPKNLDNPSKKE
QELIAKKTEKAKYLSLETIKLALEEFNKHRDIDKQCRFEEILANFAAIPMIFDEIAQNKDNLAQISIKYQNQG
KKDLLQASAEDDVKAIKDLLDQTNNLLHKLKIFHISQSEDKANILDKDEHFYLVFEECYFELANIVPLYNKI
RNYITQKPYSDEKFKLNFENSTLANGWDKNKEPDNTAILFIKDDKYYLGVMNKKNNKIFDDKAIKENKGE
GYKKIVYKLLPGANKMLPKVFFSAKSIKFYNPSEDILRIRNHSTHTKNGSPQKGYEKFEFNIEDCRKFIDFYK
QSISKHPEWKDFGFRFSDTQRYNSIDEFYREVENQGYKLTFENISESYIDSVVNQGKLYLFQIYNKDFSAYSK
GRPNLHTLYWKALFDERNLQDVVYKLNGEAELFYRKQSIPKKITHPAKEAIANKNKDNPKKESVFEYDLIK
DKRFTEDKFFFHCPITINFKSSGANKENDEINLLLKEKANDVHILSIDRGERHLAYYTLVDGKGNIIKQDTENI
IGNDRMKTNYHDKLAAIEKDRDSARKDWKKINNIKEMKEGYLSQVVHEIAKLVIEYNAIVVFEDLNFGFK
RGRFKVEKQVYQKLEKMLIEKLNYLVFKDNEFDKTGGVLRAYQLTAPFETFKKMGKQTGIIYYVPAGFTS
KICPVTGFVNQLYPKYESVSKSQEFFSKFDKICYNLDKGYFEFSFDYKNFGDKAAKGKWTIASFGSRLINFR
NSDKNHNWDTREVYPTKELEKLLKDYSIEYGHGECIKAAICGESDKKFFAKLTSVLNTILQMRNSKTGTEL
DYLISPVADVNGNFFDSRQAPKNMPQDADANGAYHIGLKGLMLLGRIKNNQEGKKLNLVIKNEEYFEFVQ
NRNN

[0432] An additional napDNAbp domain with altered PAM specificity, such as a domain having at least 80%, at least 85%, at least 90%, at least 95%, or at least 99% sequence identity with wild type Geobacillus thermodenitrificans Cas9 (SEQ ID NO: 20), which has the following amino acid sequence:

(SEQ ID NO: 20)
MKYKIGLDIGITSIGWAVINLDIPRIEDLGVRIFDRAENPKTGESLALPRRLARSARRRLRRRKHRLERIRRLF
VREGILTKEELNKLFEKKHEIDVWQLRVEALDRKLNNDELARILLHLAKRRGFRSNRKSERTNKENSTMLK
HIEENQSILSSYRTVAEMVVKDPKESLHKRNKEDNYTNTVARDDLEREIKLIFAKQREYGNIVCTEAFEHEY
ISIWASQRPFASKDDIEKKVGFCTFEPKEKRAPKATYTFQSFTVWEHINKLRLVSPGGIRALTDDERRLIYKQ
AFHKNKITFHDVRTLLNLPDDTRFKGLLYDRNTTLKENEKVRFLELGAYHKIRKAIDSVYGKGAAKSFRPI
DFDTFGYALTMFKDDTDIRSYLRNEYEQNGKRMENLADKVYDEELIEELLNLSFSKFGHLSLKALRNILPY
MEQGEVYSTACERAGYTFTGPKKKQKTVLLPNIPPIANPVVMRALTQARKVVNAIIKKYGSPVSIHIELARE
LSQSFDERRKMQKEQEGNRKKNETAIRQLVEYGLTLNPTGLDIVKFKLWSEQNGKCAYSLQPIEIERLLEPG
YTEVDHVIPYSRSLDDSYTNKVLVLTKENREKGNRTPAEYLGLGSERWQQFETFVLINKQFSKKKRDRLL
RLHYDENEENEFKNRNLNDTRYISRFLANFIREHLKFADSDDKQKVYTVNGRITAHLRSRWNENKNREESN
LHHAVDAAIVACTTPSDIARVTAFYQRREQNKELSKKTDPQFPQPWPHFADELQARLSKNPKESIKALNLG
NYDNEKLESLQPVFVSRMPKRSITGAAHQETLRRYIGIDERSGKIQTVVKKKLSEIQLDKTGHFPMYGKESD
PRTYEAIRQRLLEHNNDPKKAFQEPLYKPKKNGELGPUIRTIKIIDTTNQVIPLNDGKTVAYNSNIVRVDVFE
KDGKYYCVPIYTIDMMKGILPNKAIEPNKPYSEWKEMTEDYTFRESLYPNDLIRIEFPREKTIKTAVGEEIKI
KDLFAYYQTIDSSNGGLSLVSHDNNFSLRSIGSRTLKRFEKYQVDVLGNIYKVRGEKRVGVASSSHSKAGE
TIRPL

[0433] In some embodiments, the nucleic acid programmable DNA binding protein (napDNAbp) is a nucleic acid programmable DNA binding protein that does not require a canonical (NGG) PAM sequence. In some embodiments, the napDNAbp is an argonaute protein. One example of such a nucleic acid programmable DNA binding protein is an Argonaute protein from Natronobacterium gregoryi (NgAgo). NgAgo is a ssDNA-guided endonuclease. NgAgo binds 5′ phosphorylated ssDNA of ˜24 nucleotides (gDNA) to guide it to its target site and will make DNA double-strand breaks at the gDNA site. In contrast to Cas9, the NgAgo-gDNA system does not require a protospacer-adjacent motif (PAM). Using a nuclease inactive NgAgo (dNgAgo) can greatly expand the bases that may be targeted. The characterization and use of NgAgo have been described in Gao et al., Nat Biotechnol., 34(7): 768-73 (2016), PubMed PMID: 27136078; Swarts et al., Nature, 507(7491): 258-61 (2014); and Swarts et al., Nucleic Acids Res. 43(10) (2015): 5120-9, each of which is incorporated herein by reference. The sequence of Natronobacterium gregoryi Argonaute is provided in SEQ ID NO: 67.

[0434] The disclosed fusion proteins may comprise a napDNAbp domain having at least 80%, at least 85%, at least 90%, at least 95%, or at least 99% sequence identity with wild type Natronobacterium gregoryi Argonaute (SEQ ID NO: 67), which has the following amino acid sequence:

(SEQ ID NO: 67)
MTVIDLDSTTTADELTSGHTYDISVTLTGVYDNTDEQHPRMSLAFEQDNGERRYITLWKNTTPKDVFTYDY
ATGSTYIFTNIDYEVKDGYENLTATYQTTVENATAQEVGTTDEDETFAGGEPLDHHLDDALNETPDDAETE
SDSGHVMTSFASRDQLPEWTLHTYTLTATDGAKTDTEYARRTLAYTVRQELYTDHDAAPVATDGLMLLT
PEPLGETPLDLDCGVRVEADETRTLDYTTAKDRLLARELVEEGLKRSLWDDYLVRGIDEVLSKEPVLTCDE
FDLHERYDLSVEVGHSGRAYLHINFRHRFVPKLTLADIDDDNIYPGLRVKTTYRPRRGHIVWGLRDECATD
SLNTLGNQSVVAYHRNNQTPINTDLLDAIEAADRRVVETRRQGHGDDAVSFPQELLAVEPNTHQIKQFASD
GFHQQARSKTRLSASRCSEKAQAFAERLDPVRLNGSTVEFSSEFFTGNNEQQLRLLYENGESVLTFRDGAR
GAHPDETFSKGIVNPPESFEVAVVLPEQQADTCKAQWDTMADLLNQAGAPPTRSETVQYDAFSSPESISLN
VAGAIDPSEVDAAFVVLPPDQEGFADLASPTETYDELKKALANMGIYSQMAYFDRFRDAKIFYTRNVALG
LLAAAGGVAFITEHAMPGDADMFIGIDVSRSYPEDGASGQINIAATATAVYKDGTILGHSSTRPQLGEKLQ
STDVRDIMKNAILGYQQVTGESPTHIVIHRDGFMNEDLDPATEFLNEQGVEYDIVEIRKQPQTRLLAVSDVQ
YDTPVKSIAAINQNEPRATVATFGAPEYLATRDGGGLPRPIQIERVAGETDIETLTRQVYLLSQSHIQVHNST
ARLPITTAYADQASTHATKGYLVQTGAFESNVGFL

[0435] In addition, any available methods may be utilized to obtain or construct a variant or mutant Cas9 protein. The term “mutation,” as used herein, refers to a substitution of a residue within a sequence, e.g., a nucleic acid or amino acid sequence, with another residue, or a deletion or insertion of one or more residues within a sequence. Mutations are typically described herein by identifying the original residue followed by the position of the residue within the sequence and by the identity of the newly substituted residue. Various methods for making the amino acid substitutions (mutations) provided herein are well known in the art, and are provided by, for example, Green and Sambrook, Molecular Cloning: A Laboratory Manual ⁽⁴th ed., Cold Spring Harbor Laboratory Press, Cold Spring Harbor, N.Y. (2012)). Mutations can include a variety of categories, such as single base polymorphisms, microduplication regions, indel, and inversions, and is not meant to be limiting in any way. Mutations can include “loss-of-function” mutations which is the normal result of a mutation that reduces or abolishes a protein activity. Most loss-of-function mutations are recessive, because in a heterozygote the second chromosome copy carries an unmutated version of the gene coding for a fully functional protein whose presence compensates for the effect of the mutation. Mutations also embrace “gain-of-function” mutations, which is one which confers an abnormal activity on a protein or cell that is otherwise not present in a normal condition. Many gain-of-function mutations are in regulatory sequences rather than in coding regions, and can therefore have a number of consequences. For example, a mutation might lead to one or more genes being expressed in the wrong tissues, these tissues gaining functions that they normally lack. Because of their nature, gain-of-function mutations are usually dominant.

[0436] Mutations can be introduced into a reference Cas9 protein using site-directed mutagenesis. Older methods of site-directed mutagenesis known in the art rely on sub-cloning of the sequence to be mutated into a vector, such as an M13 bacteriophage vector, that allows the isolation of single-stranded DNA template. In these methods, one anneals a mutagenic primer (i.e., a primer capable of annealing to the site to be mutated but bearing one or more mismatched nucleotides at the site to be mutated) to the single-stranded template and then polymerizes the complement of the template starting from the 3′ end of the mutagenic primer. The resulting duplexes are then transformed into host bacteria and plaques are screened for the desired mutation. More recently, site-directed mutagenesis has employed PCR methodologies, which have the advantage of not requiring a single-stranded template. In addition, methods have been developed that do not require sub-cloning. Several issues must be considered when PCR-based site-directed mutagenesis is performed. First, in these methods it is desirable to reduce the number of PCR cycles to prevent expansion of undesired mutations introduced by the polymerase. Second, a selection must be employed in order to reduce the number of non-mutated parental molecules persisting in the reaction. Third, an extended-length PCR method is preferred in order to allow the use of a single PCR primer set. And fourth, because of the non-template-dependent terminal extension activity of some thermostable polymerases it is often necessary to incorporate an end-polishing step into the procedure prior to blunt-end ligation of the PCR-generated mutant product.

[0437] Mutations may also be introduced by directed evolution processes, such as phage-assisted continuous evolution (PACE) or phage-assisted noncontinuous evolution (PANCE). The term “phage-assisted continuous evolution (PACE),” as used herein, refers to continuous evolution that employs phage as viral vectors. The general concept of PACE technology has been described, for example, in International PCT Application, PCT/US2009/056194, filed Sep. 8, 2009, published as WO 2010/028347 on Mar. 11, 2010; International PCT Application, PCT/US2011/066747, filed Dec. 22, 2011, published as WO 2012/088381 on Jun. 28, 2012; U.S. Application, U.S. Pat. No. 9,023,594, issued May 5, 2015, International PCT Application, PCT/US2015/012022, filed Jan. 20, 2015, published as WO 2015/134121 on Sep. 11, 2015, and International PCT Application, PCT/US2016/027795, filed Apr. 15, 2016, published as WO 2016/168631 on Oct. 20, 2016, the entire contents of each of which are incorporated herein by reference. Variant Cas9s may also be obtain by phage-assisted non-continuous evolution (PANCE),” which as used herein, refers to non-continuous evolution that employs phage as viral vectors. PANCE is a simplified technique for rapid in vivo directed evolution using serial flask transfers of evolving ‘selection phage’ (SP), which contain a gene of interest to be evolved, across fresh E. coli host cells, thereby allowing genes inside the host E. coli to be held constant while genes contained in the SP continuously evolve. Serial flask transfers have long served as a widely-accessible approach for laboratory evolution of microbes, and, more recently, analogous approaches have been developed for bacteriophage evolution. The PANCE system features lower stringency than the PACE system.

[0438] Any of the references noted above which relate to Cas9 or Cas9 equivalents are hereby incorporated by reference in their entireties, if not already stated so.

### Other Programmable Nucleases

[0439] In various embodiments described herein, the prime editors comprise a napDNAbp, such as a Cas9 protein. These proteins are “programmable” by way of their becoming complexed with a guide RNA (or a PEgRNA, as the case may be), which guides the Cas9 protein to a target site on the DNA which possess a sequence that is complementary to the spacer portion of the gRNA (or PEgRNA) and also which possesses the required PAM sequence. However, in certain embodiment envisioned here, the napDNAbp may be substituted with a different type of programmable protein, such as a zinc finger nuclease or a transcription activator-like effector nuclease (TALEN).

[0440] It is contemplated that suitable nucleases do not necessarily need to be “programmed” by a nucleic acid targeting molecule (such as a guide RNA), but rather, may be programmed by defining the specificity of a DNA-binding domain, such as and in particular, a nuclease. Just as in prime editing with napDNAbp moieties, it is preferable that such alternative programmable nucleases be modified such that only one strand of a target DNA is cut. In other words, the programmable nucleases should function as nickases, preferably. Once a programmable nuclease is selected (e.g., a ZFN or a TALEN), then additional functionalities may be engineered into the system to allow it to operate in accordance with a prime editing-like mechanism. For example, the programmable nucleases may be modified by coupling (e.g., via a chemical linker) an RNA or DNA extension arm thereto, wherein the extension arm comprises a primer binding site (PBS) and a DNA synthesis template. The programmable nuclease may also be coupled (e.g., via a chemical or amino acid linker) to a polymerase, the nature of which will depend upon whether the extension arm is DNA or RNA. In the case of an RNA extension arm, the polymerase can be an RNA-dependent DNA polymerase (e.g., reverse transcriptase). In the case of a DNA extension arm, the polymerase can be a DNA-dependent DNA polymerase (e.g., a prokaryotic polymerase, including Pol I, Pol II, or Pol III, or a eukaryotic polymerase, including Pol a, Pol b, Pol g, Pol d, Pol e, or Pol z). The system may also include other functionalities added as fusions to the programmable nucleases, or added in trans to facilitate the reaction as a whole (e.g., (a) a helicase to unwind the DNA at the cut site to make the cut strand with the 3′ end available as a primer, (b) a FEN1 to help remove the endogenous strand on the cut strand to drive the reaction towards replacement of the endogenous strand with the synthesized strand, or (c) a nCas9:gRNA complex to create a second site nick on the opposite strand, which may help drive the integration of the synthesize repair through favored cellular repair of the non-edited strand). In an analogous manner to prime editing with a napDNAbp, such a complex with an otherwise programmable nuclease could be used to synthesize and then install a newly synthesized replacement strand of DNA carrying an edit of interest permanently into a target site of DNA.

[0441] Suitable alternative programmable nucleases are well known in the art which may be used in place of a napDNAbp:gRNA complex to construct an alternative prime editor system that can be programmed to selectively bind a target site of DNA, and which can be further modified in the manner described above to co-localize a polymerase and an RNA or DNA extension arm comprising a primer binding site and a DNA synthesis template to specific nick site. For example, Transcription Activator-Like Effector Nucleases (TALENs) may be used as the programmable nuclease in the prime editing methods and compositions of matter described herein. TALENS are artificial restriction enzymes generated by fusing the TAL effector DNA binding domain to a DNA cleavage domain. These reagents enable efficient, programmable, and specific DNA cleavage and represent powerful tools for genome editing in situ. Transcription activator-like effectors (TALEs) can be quickly engineered to bind practically any DNA sequence. The term TALEN, as used herein, is broad and includes a monomeric TALEN that can cleave double stranded DNA without assistance from another TALEN. The term TALEN is also used to refer to one or both members of a pair of TALENs that are engineered to work together to cleave DNA at the same site. TALENs that work together may be referred to as a left-TALEN and a right-TALEN, which references the handedness of DNA. See U.S. Ser. No. 12/965,590; U.S. Ser. No. 13/426,991 (U.S. Pat. No. 8,450,471); U.S. Ser. No. 13/427,040 (U.S. Pat. No. 8,440,431); U.S. Ser. No. 13/427,137 (U.S. Pat. No. 8,440,432); and U.S. Ser. No. 13/738,381, all of which are incorporated by reference herein in their entirety. In addition, TALENS are described in WO 2015/027134, U.S. Pat. No. 9,181,535, Boch et al., “Breaking the Code of DNA Binding Specificity of TAL-Type 11 Effectors”, Science, vol. 326. pp. 1509-1512 (2009), Bogdanove et al., TAL Effectors: Customizable Proteins for DNA Targeting, Science, vol. 333, pp. 1843-1846 (2011), Cade et al., “Highly efficient generation of heritable zebrafish gene mutations using homo- and heterodimeric TALENs”, Nucleic Acids Research, vol. 40, pp. 8001-8010 (2012), and Cermak et al., “Efficient design and assembly of custom TALEN and other TAL effector-based constructs for DNA targeting”. Nucleic Acids Research, vol. 39, No. 17, e82 (2011), each of which are incorporated herein by reference.

[0442] Zinc finger nucleases may also be used as alternative programmable nucleases for use in the prime editing methods and compositions disclosed herein in place of napDNAbps, such as Cas9 nickases. Like with TALENS, the ZFN proteins may be modified such that they function as nickases, i.e., engineering the ZFN such that it cleaves only one strand of the target DNA in a manner similar to the napDNAbp used with the prime editors in the methods and compositions described herein. ZFN proteins have been extensively described in the art, for example, in Carroll et al., “Genome Engineering with Zinc-Finger Nucleases,” Genetics, August 2011, Vol. 188: 773-782; Durai et al., “Zinc finger nucleases: custom-designed molecular scissors for genome engineering of plant and mammalian cells,” Nucleic Acids Res, 2005, Vol. 33: 5978-90; and Gaj et al., “ZFN, TALEN, and CRISPR/Cas-based methods for genome engineering,” Trends Biotechnol. 2013, Vol. 31: 397-405, each of which are incorporated herein by reference in their entireties.

### Prime Editors: Polymerase Domain (e.g., Reverse Transcriptases)

[0443] The present disclosure provides compositions and methods for prime editing with improved editing efficiency and/or reduced indel formation by inhibiting the DNA mismatch repair pathway while conducting prime editing of a target site. Accordingly, the present disclosure provides a method for editing a nucleic acid molecule by prime editing that involves contacting a nucleic acid molecule with a prime editor, a pegRNA, and an inhibitor of the DNA mismatch repair pathway, thereby installing one or more modifications to the nucleic acid molecule at a target site with increased editing efficiency and/or lower indel formation. The present disclosure further provides polynucleotides for editing a DNA target site by prime editing comprising a nucleic acid sequence encoding a napDNAbp, a polymerase, and an inhibitor of the DNA mismatch repair pathway, wherein the napDNAbp and polymerase is capable in the presence of a pegRNA of installing one or more modifications in the DNA target site with increased editing efficiency and/or lower indel formation. Thus, the methods and compositions described herein utilize prime editors, which may comprise a polymerase (e.g., a reverse transcriptase).

[0444] In various embodiments, the prime editors used in the methods and compositions disclosed herein includes a polymerase (e.g., DNA-dependent DNA polymerase or RNA-dependent DNA polymerase, such as, reverse transcriptase), or a variant thereof, which can be provided as a fusion protein with a napDNAbp or other programmable nuclease, or provide in trans.

[0445] Any polymerase may be used in the prime editors with the methods and compositions disclosed herein. The polymerases may be wild type polymerases, functional fragments, mutants, variants, or truncated variants, and the like. The polymerases may include wild type polymerases from eukaryotic, prokaryotic, archael, or viral organisms, and/or the polymerases may be modified by genetic engineering, mutagenesis, directed evolution-based processes. The polymerases may include T7 DNA polymerase. T5 DNA polymerase, T4 DNA polymerase. Klenow fragment DNA polymerase, DNA polymerase III and the like. The polymerases may also be thermostable, and may include Taq, Tne, Tma, Pfu, Tfl, Tth, Stoffel fragment, VENT® and DEEPVENT® DNA polymerases, KOD, Tgo, JDF3, and mutants, variants and derivatives thereof (see U.S. Pat. Nos. 5,436,149; 4,889,818; 4,965,185; 5,079,352; 5,614,365; 5,374,553; 5,270,179; 5,047,342; 5,512,462; WO 92/06188; WO 92/06200; WO 96/10640; Barnes, W. M., Gene 112:29-35 (1992); Lawyer, F. C., et al., PCR Meth. Appl. 2:275-287 (1993); Flaman, J.-M, et al., Nuc. Acids Res. 22(15):3259-3260 (1994), each of which are incorporated by reference). For synthesis of longer nucleic acid molecules (e.g., nucleic acid molecules longer than about 3-5 Kb in length), at least two DNA polymerases can be employed. In certain embodiments, one of the polymerases can be substantially lacking a 3′ exonuclease activity and the other may have a 3′ exonuclease activity. Such pairings may include polymerases that are the same or different. Examples of DNA polymerases substantially lacking in 3′ exonuclease activity include, but are not limited to. Taq, Tne(exo-), Tma(exo-), Pfu(exo-), Pwo(exo-), exo-KOD and Tth DNA polymerases, and mutants, variants and derivatives thereof.

[0446] Preferably, the polymerase usable in the prime editors utilized in the methods and compositions disclosed herein are “template-dependent” polymerase (since the polymerases are intended to rely on the DNA synthesis template to specify the sequence of the DNA strand under synthesis during prime editing. As used herein, the term “template DNA molecule” refers to that strand of a nucleic acid from which a complementary nucleic acid strand is synthesized by a DNA polymerase, for example, in a primer extension reaction of the DNA synthesis template of a PEgRNA.

[0447] As used herein, the term “template dependent manner” is intended to refer to a process that involves the template dependent extension of a primer molecule (e.g., DNA synthesis by DNA polymerase). The term “template dependent manner” refers to polynucleotide synthesis of RNA or DNA wherein the sequence of the newly synthesized strand of polynucleotide is dictated by the well-known rules of complementary base pairing (see, for example, Watson, J. D. el al., In: Molecular Biology of the Gene, ⁴th Ed., W. A. Benjamin. Inc., Menlo Park. Calif. (1987)). The term “complementary” refers to the broad concept of sequence complementarity between regions of two polynucleotide strands or between two nucleotides through base-pairing. It is known that an adenine nucleotide is capable of forming specific hydrogen bonds (“base pairing”) with a nucleotide which is thymine or uracil. Similarly, it is known that a cytosine nucleotide is capable of base pairing with a guanine nucleotide. As such, in the case of prime editing, it can be said that the single strand of DNA synthesized by the polymerase of the prime editor against the DNA synthesis template is said to be “complementary” to the sequence of the DNA synthesis template.

### A. Exemplary Polymerases

[0448] In various embodiments, the prime editors utilized in the methods and compositions described herein comprise a polymerase. The disclosure contemplates any wild type polymerase obtained from any naturally-occurring organism or virus, or obtained from a commercial or non-commercial source. In addition, the polymerases usable in the prime editors can include any naturally-occurring mutant polymerase, engineered mutant polymerase, or other variant polymerase, including truncated variants that retain function. The polymerases usable herein may also be engineered to contain specific amino acid substitutions, such as those specifically disclosed herein. In certain preferred embodiments, the polymerases usable in the prime editors utilized in the methods and compositions of the present disclosure are template-based polymerases, i.e., they synthesize nucleotide sequences in a template-dependent manner.

[0449] A polymerase is an enzyme that synthesizes a nucleotide strand and which may be used in connection with the prime editor systems utilized in the methods and compositions described herein. The polymerases are preferably “template-dependent” polymerases (i.e., a polymerase which synthesizes a nucleotide strand based on the order of nucleotide bases of a template strand). In certain configurations, the polymerases can also be a “template-independent” (i.e., a polymerase which synthesizes a nucleotide strand without the requirement of a template strand). A polymerase may also be further categorized as a “DNA polymerase” or an “RNA polymerase.” In various embodiments, the prime editor systems comprise a DNA polymerase. In various embodiments, the DNA polymerase can be a “DNA-dependent DNA polymerase” (i.e., whereby the template molecule is a strand of DNA). In such cases, the DNA template molecule can be a PEgRNA, wherein the extension arm comprises a strand of DNA. In such cases, the PEgRNA may be referred to as a chimeric or hybrid PEgRNA which comprises an RNA portion (i.e., the guide RNA components, including the spacer and the gRNA core) and a DNA portion (i.e., the extension arm). In various other embodiments, the DNA polymerase can be an “RNA-dependent DNA polymerase” (i.e., whereby the template molecule is a strand of RNA). In such cases, the PEgRNA is RNA, i.e., including an RNA extension. The term “polymerase” may also refer to an enzyme that catalyzes the polymerization of nucleotide (i.e., the polymerase activity). Generally, the enzyme will initiate synthesis at the 3′-end of a primer annealed to a polynucleotide template sequence (e.g., such as a primer sequence annealed to the primer binding site of a PEgRNA), and will proceed toward the 5′ end of the template strand. A “DNA polymerase” catalyzes the polymerization of deoxynucleotides. As used herein in reference to a DNA polymerase, the term DNA polymerase includes a “functional fragment thereof”. A “functional fragment thereof” refers to any portion of a wild-type or mutant DNA polymerase that encompasses less than the entire amino acid sequence of the polymerase and which retains the ability, under at least one set of conditions, to catalyze the polymerization of a polynucleotide. Such a functional fragment may exist as a separate entity, or it may be a constituent of a larger polypeptide, such as a fusion protein.

[0450] In some embodiments, the polymerases can be from bacteriophage. Bacteriophage DNA polymerases are generally devoid of 5′ to 3′ exonuclease activity, as this activity is encoded by a separate polypeptide. Examples of suitable DNA polymerases are T4, T7, and phi29 DNA polymerase. The enzymes available commercially are: T4 (available from many sources e.g., Epicentre) and T7 (available from many sources, e.g., Epicentre for unmodified and USB for 3′ to 5′ exo T7 “Sequenase” DNA polymerase).

[0451] The other embodiments, the polymerases are archaeal polymerases. There are 2 different classes of DNA polymerases which have been identified in archaea: 1. Family B/pol I type (homologs of Pfu from Pyrococcus furiosus) and 2. pol II type (homologs of P. furiosus DP1/DP2 2-subunit polymerase). DNA polymerases from both classes have been shown to naturally lack an associated 5′ to 3′ exonuclease activity and to possess 3′ to 5′ exonuclease (proofreading) activity. Suitable DNA polymerases (pol I or pol II) can be derived from archaea with optimal growth temperatures that are similar to the desired assay temperatures. Thermostable archaeal DNA polymerases are isolated from Pyrococcus species (furiosus, species GB-D, woesii, abysii, horikoshii), Thermococcus species (kodakaraensis KOD1, litoralis, species 9 degrees North-7, species JDF-3, gorgonarius), Pyrodictium occultum, and Archaeoglobus fulgidus.

[0452] Polymerases may also be from eubacterial species. There are 3 classes of eubacterial DNA polymerases, pol I, II, and III. Enzymes in the Pol I DNA polymerase family possess 5′ to 3′ exonuclease activity, and certain members also exhibit 3′ to 5′ exonuclease activity. Pol II DNA polymerases naturally lack 5′ to 3′ exonuclease activity, but do exhibit 3′ to 5′ exonuclease activity. Pol III DNA polymerases represent the major replicative DNA polymerase of the cell and are composed of multiple subunits. The pol III catalytic subunit lacks 5′ to ‘3′ exonuclease activity, but in some cases’ 3′ to 5′ exonuclease activity is located in the same polypeptide. There are a variety of commercially available Pol I DNA polymerases, some of which have been modified to reduce or abolish 5′ to ‘3′ exonuclease activity.

[0453] Suitable thermostable pol I DNA polymerases can be isolated from a variety of thermophilic eubacteria, including Thermus species and Thermotoga maritima such as Thermus aquaticus (Taq), Thermus thermophilus (Tth) and Thermotoga maritina (Tma UITma). Additional eubacteria related to those listed above are described in Thermophilic Bacteria (Kristjansson, J. K., ed.) CRC Press, Inc., Boca Raton, Fla., 1992.

[0454] The invention further provides for chimeric or non-chimeric DNA polymerases that are chemically modified according to methods disclosed in U.S. Pat. Nos. 5,677,152, 6,479,264 and 6,183,998, the contents of which are hereby incorporated by reference in their entirety. Additional archaea DNA polymerases related to those listed above are described in the following references: Archaea: A Laboratory Manual (Robb, F. T. and Place. A. R., eds.), Cold Spring Harbor Laboratory Press, Cold Spring Harbor, N.Y., 1995 and Thermophilic Bacteria (Kristjansson, J. K., ed.) CRC Press, Inc., Boca Raton, Fla., 1992.

### B. Exemplary Reverse Transcriptases

[0455] In various embodiments, the prime editors utilized in the methods and compositions described herein comprise a reverse transcriptase as the polymerase. The disclosure contemplates any wild type reverse transcriptase obtained from any naturally-occurring organism or virus, or obtained from a commercial or non-commercial source. In addition, the reverse transcriptases usable in the prime editors utilized in the methods and compositions of the disclosure can include any naturally-occurring mutant RT, engineered mutant RT, or other variant RT, including truncated variants that retain function. The RTs may also be engineered to contain specific amino acid substitutions, such as those specifically disclosed herein.

[0456] Reverse transcriptases are multi-functional enzymes typically with three enzymatic activities including RNA- and DNA-dependent DNA polymerization activity, and an RNaseH activity that catalyzes the cleavage of RNA in RNA-DNA hybrids. Some mutants of reverse transcriptases have disabled the RNaseH moiety to prevent unintended damage to the mRNA. These enzymes that synthesize complementary DNA (cDNA) using mRNA as a template were first identified in RNA viruses. Subsequently, reverse transcriptases were isolated and purified directly from virus particles, cells or tissues. (e.g., see Kacian et al., 1971, Biochim. Biophys. Acta 46: 365-83; Yang et al., 1972, Biochem. Biophys. Res. Comm. 47: 505-11; Gerard et al., 1975, J. Virol. 15: 785-97; Liu et al., 1977, Arch. Virol. 55 187-200; Kato et al., 1984, J. Virol. Methods 9: 325-39; Luke et al., 1990. Biochem. 29: 1764-69 and Le Grice et al., 1991. J. Virol. 65: 7004-07, each of which are incorporated by reference). More recently, mutants and fusion proteins have been created in the quest for improved properties such as thermostability, fidelity and activity. Any of the wild type, variant, and/or mutant forms of reverse transcriptase which are known in the art or which can be made using methods known in the art are contemplated herein.

[0457] The reverse transcriptase (RT) gene (or the genetic information contained therein) can be obtained from a number of different sources. For instance, the gene may be obtained from eukaryotic cells which are infected with retrovirus, or from a number of plasmids which contain either a portion of or the entire retrovirus genome. In addition, messenger RNA-like RNA which contains the RT gene can be obtained from retroviruses. Examples of sources for RT include, but are not limited to, Moloney murine leukemia virus (M-MLV or MLVRT); human T-cell leukemia virus type 1 (HTLV-1); bovine leukemia virus (BLV); Rous Sarcoma Virus (RSV); human immunodeficiency virus (HIV); yeast, including Saccharomyces, Neurospora, Drosophila; primates; and rodents. See, for example, Weiss, et al., U.S. Pat. No. 4,663,290 (1987); Gerard, G. R., DNA:271-79 (1986); Kotewicz, M. L., et al., Gene 35:249-58 (1985); Tanese, N., et al., Proc. Natl. Acad. Sci. (USA):4944-48 (1985); Roth, M. J., at al., J. Biol. Chem. 260:9326-35 (1985); Michel, F., et al., Nature 316:641-43 (1985); Akins, R. A., et al., Cell 47:505-16 (1986), EMBO J. 4:1267-75 (1985); and Fawcett, D. F., Cell 47:1007-15 (1986) (each of which are incorporated herein by reference in their entireties).

### Wild Type RTs

[0458] Exemplary enzymes for use with the prime editors can include, but are not limited to, M-MLV reverse transcriptase and RSV reverse transcriptase. Enzymes having reverse transcriptase activity are commercially available. In certain embodiments, the reverse transcriptase provided in trans to the other components of the prime editor system. That is, the reverse transcriptase is expressed or otherwise provided as an individual component. i.e., not as a fusion protein with a napDNAbp.

[0459] A person of ordinary skill in the art will recognize that wild type reverse transcriptases, including but not limited to, Moloney Murine Leukemia Virus (M-MLV); Human Immunodeficiency Virus (HIV) reverse transcriptase and avian Sarcoma-Leukosis Virus (ASLV) reverse transcriptase, which includes but is not limited to Rous Sarcoma Virus (RSV) reverse transcriptase, Avian Myeloblastosis Virus (AMV) reverse transcriptase, Avian Erythroblastosis Virus (AEV) Helper Virus MCAV reverse transcriptase, Avian Myelocytomatosis Virus MC29 Helper Virus MCAV reverse transcriptase, Avian Reticuloendotheliosis Virus (REV-T) Helper Virus REV-A reverse transcriptase, Avian Sarcoma Virus UR2 Helper Virus UR2AV reverse transcriptase, Avian Sarcoma Virus Y73 Helper Virus YAV reverse transcriptase, Rous Associated Virus (RAV) reverse transcriptase, and Myeloblastosis Associated Virus (MAV) reverse transcriptase may be suitably used in the subject methods and composition described herein.

[0460] Exemplary wild type RT enzymes are as follows:

| Description | Sequence |
|---|---|
| REVERSE | TLNIEDEYRLHETSKEPDVSLGSTWLSDFPQAWAETGGMGLAVRQAPLIIPLKATST |
| TRANSCRIPTASE | PVSIKQYPMSQEARLGIKPHIQRLLDQGILVPCQSPWNTPLLPVKKPGTNDYRPVQD |
| (M-MLV RT) WILD | LREVNKRVEDIHPTVPNPYNLLSGLPPSHQWYTVLDLKDAFFCLRLHPTSQPLFAFE |
| TYPE | WRDPEMGISGQLTWTRLPQGFKNSPTLFDEALHRDLADFRIQHPDLILLQYVDDLL |
| MOLONEY | LAATSELDCQQGTRALLQTLGNLGYRASAKKAQICQKQVKYLGYLLKEGQRWLT |
| MURINE | EARKETVMGQPTPKTPRQLREFLGTAGFCRLWIPGFAEMAAPLYPLIKTGTLFNW |
| LEUKEMIA VIRUS | GPDQQKAYQEIKQALLTAPALGLPDLTKPFELFVDEKQGYAKGVLTQKLGPWRRP |
| USED IN PE1 | VAYLSKKLDPVAAGWPPCLRMVAAIAVLTKDAGKLTMGQPLVILAPHAVEALVK |
| (PRIME EDITOR 1 | QPPDRWLSNARMTHYQALLLDTDRVQFGPVVALNPATLLPLPEEGLQHNCLDILA |
| FUSION PROTEIN | EAHGTRPDLTDQPLPDADHTWYTDGSSLLQEGQRKAGAAVTTETEVIWAKALPAG |
| DISCLOSED | TSAQRAELIALTQALKMAEGKKLNVYTDSRYAFATAHIHGEIYRRRGLLTSEGKEI |
| HEREIN) | KNKDEILALLKALFLPKRLSIIHCPGHQKGHSAEARGNRMADQAARKAAITETPDT |
| | STLLIENSSP (SEQ ID NO: 81) |
| REVERSE | AFPLERPDWDYTTQAGRNHLVHYRQLLLAGLQNAGRSPINLAKVKGITQGPNESP |
| TRANSCRIPTASE | SAFLERLKEAYRRYTPYDPEDPGQETNVSMSFIWQSAPDIGRKLGRLEDLKSKTLG |
| MOLONEY | DLVREAEKIFNKRETPEEREERIRRETEEKEERRRTVDEQKEKERDRRRHREMSKLL |
| MURINE | ATVVIGQEQDRQEGERKRPQLDKDQCAYCKEKGHWAKDCPKKPRGPRGPRPQTS |
| LEUKEMIA VIRUS | LLTLGDXGGQGQDPPPEPRITLKVGGQPVTFLVDTGAQHSVLTQNPGPLSDKSAW |
| REF SEQ. | VQGATGGKRYRWTTDRKVHLATGKVTHSFLHVPDCPYPLLGRDLLTKLKAQIHFE |
| AAA66622.1 | GSGAQVVGPMGQPLQVLTLNIEDEYRLHETSKEPDVSLGFTWLSDFPQAWAESGG |
| | MGLAVRQAPLIIPLKATSTPVSIKQYPMSQEARLGIKPHIQRLLDQGILVPCQSPWNT |
| | PLLPVKKPGTNDYRPVQDLREVNKRVEDIHPTVPNPYNLLSGLPPSHQWYTVLDLK |
| | DAFFCLRLHPTSQPLFAFEWRDPEMGISGQLTWTRLPQGFKNSPTLFDEALHRDLA |
| | DFR (SEQ ID NO: 69) |
| REVERSE | TLQLEEEYRLFEPESTQKQEMDIWLKNFPQAWAETGGMGTAHCQAPVLIQLKATA |
| TRANSCRIPTASE | TPISIRQYPMPHEAYQGIKPHIRRMLDQGILKPCQSPWNTPLLPVKKPGTEDYRPVQ |
| FELINE LEUKEMIA | DLREVNKRVEDIHPTVPNPYNLLSTLPPSHPWYTVLDLKDAFFCLRLHSESQLLEAF |
| VIRUS | EWRDPEIGLSGQLTWTRLPQGFKNSPTLFDEALHSDLADFRVRYPALVLLQYVDDL |
| REF SEQ. | LLAAATRTECLEGTKALLETLGNKGYRASAKKAQICLQEVTYLGYSLKDGQRWLT |
| NP955579.1 | KARKEAILSIPVPKNSRQVREFLGTAGYCRLWIPGFAELAAPLYPLTRPGTLFQWGT |
| | EQQLAFEDIKKALLSSPALGLPDITKPFELFIDENSGFAKGVLVQKLGPWKRPVAYL |
| | SKKLDTVASGWPPCLRMVAAIAILVKDAGKLTLGQPLTILTSHPVEALVRQPPNKW |
| | LSNARMTHYQAMLLDAERVHFGPTVSLNPATLLPLPSGGNHHDCLQILAETHGTRP |
| | DLTDQPLPDADLTWYTDGSSFIRNGEREAGAAVTTESEVIWAAPLPPGTSAQRAELI |
| | ALTQALKMAEGKKLTVYTDSRYAFATTHVHGEIYRRRGLLTSEGKEIKNKNEILAL |
| | LEALFLPKRLSIIHCPGHQKGDSPQAKGNRLADDTAKKAATETHSSLTVL |
| | SEQ ID NO: 70) |
| REVERSE | PISPIETVPVKLKPGMDGPKVKQWPLTEEKIKALVEICTEMEKEGKISKIGPENPYNT |
| TRANSCRIPTASE | PVFAIKKKDSTKWRKLVDFRELNKRTQDFWEVQLGIPHPAGLKKKKSVTVLDVGD |
| HIV-1 RT, CHAIN A | AYFSVPLDEDFRKYTAFTIPSINNETPGIRYQYNVLPQGWKGSPAIFQSSMTKILEPF |
| REF SEQ. ITL3-A | RKQNPDIVIYQYMDDLYVGSDLEIGQHRTKIEELRQHLLRWGLTTPDKKHQKEPPF |
| | LWMGYELHPDKWTVQPIVLPEKDSWTVNDIQKLVGKLNWASQIYPGIKVRQLXK |
| | LLRGTKALTEVIPLTEEAELELAENREILKEPVHGVYYDPSKDLIAEIQKQGQGQWT |
| | YQIYQEPFKNLKTGKYARMRGAHTNDVKQLTEAVQKITTESIVIWGKTPKFKLPIQ |
| | KETWETWWTEYWQATWIPEWEFVNTPPLVKLWYQLEKEPIVGAETFYVDGAANR |
| | ETKLGKAGYVINRGRQKVVTLTDTTNQKTELQAIYLALQDSGLEVNIVTDSQYAL |
| | GIIQAQPDQSESELVNQIIEQLIKKEKVYLAWVPAHKGIGGNEQVDKLVSAGIRKV |
| | (SEQ ID NO: 71) |
| | See Martinelli et al., Virology, 1990, 174(1): 135-144, which |
| | is incorporated by reference |
| REVERSE | PISPIETVPVKLKPGMDGPKVKQWPLTEEKIKALVEICTEMEKEGKISKIGPENPYNT |
| TRANSCRIPTASE | PVFAIKKKDSTKWRKLVDFRELNKRTQDFWEVQLGIPHPAGLKKKKSVTVLDVGD |
| HIV-1 RT, CHAIN B | AYFSVPLDEDFRKYTAFTIPSINNETPGIRYQYNVLPQGWKGSPAIFQSSMTKILEPF |
| REF SEQ. ITL3-B | RKQNPDIVIYQYMDDLYVGSDLEIGQHRTKIEELRQHLLRWGLTTPDKKHQKEPPF |
| | LWMGYELHPDKWTVQPIVLPEKDSWTVNDIQKLVGKLNWASQIYPGIKVRQLCKL |
| | LRGTKALTEVIPLTEEAELELAENREILKEPVHGVYYDPSKDLIAEIQKQGQGQWTY |
| | QIYQEPFKNLKTGKYARMRGAHTNDVKQLTEAVQKITTESIVIWGKTPKFKLPIQK |
| | ETWETWWTEYWQATWIPEWEFVNTPPLVKLWYQLEKEPIVGAETF (SEQ ID NO: 72) |
| | See Stammers et al., J. Mol. Biol., 1994, 242(4): 586-588, which |
| | is incorporated by reference |
| REVERSE | TVALHLAIPLKWKPNHTPVWIDQWPLPEGKLVALTQLVEKELQLGHIEPSLSCWNT |
| TRANSCRIPTASE | PVFVIRKASGSYRLLHDLRAVNAKLVPFGAVQQGAPVLSALPRGWPLMVLDLKDC |
| ROUS SARCOMA | FFSIPLAEQDREAFAFTLPSVNNQAPARRFQWKVLPQGMTCSPTICQLIVGQILEPLR |
| VIRUS RT | LKHPSLRMLHYMDDLLLAASSHDGLEAAGEEVISTLERAGFTISPDKVQKEPGVQY |
| REF SEQ. ACL14945 | LGYKLGSTYAAPVGLVAEPRIATLWDVQKLVGSLQWLRPALGIPPRLRGPFYEQLR |
| | GSDPNEAREWNLDMKMAWREIVQLSTTAALERWDPALPLEGAVARCEQGAIGVL |
| | GQGLSTHPRPCLWLFSTQPTKAFTAWLEVLTLLITKLRASAVRTFGKEVDILLLPAC |
| | FRDELPLPEGILLALRGFAGKIRSSDTPSIFDIARPLHVSLKVRVTDHPVPGPTVFTDA |
| | SSSTHKGVVVWREGPRWEIKEIADLGASVQQLEARAVAMALLLWPTTPTNVVTDS |
| | AFVAKMLLKMGQEGVPSTAAAFILEDALSQRSAMAAVLHVRSHSEVPGFFTEGND |
| | VADSQATFQAYPLREAKDLHTALHIGPRALSKACNISMQQAREVVQTCPHCNSAP |
| | ALEAGVNPRGLGPLQIWQTDFTLEPRMAPRSWLAVTVDTASSAIVVTQHGRVTSV |
| | AAQHHWATVIAVLGRPKAIKTDNGSCFTSKSTREWLARWGIAHTTGIPGNSQGQA |
| | MVERANRLLKDKIRVLAEGDGFMKRIPTSKQGELLAKAMYALNHFERGENTKTPI |
| | QKHWRPTVLTEGPPVKIRIETGEWEKGWNVLVWGRGYAAVKNRDTDKVIWVPSR |
| | KVKPDIAQKDEVTKKDEASPLFA (SEQ ID NO: 73) |
| | See Yasukawa et al., J. Biochem. 2009, 145(3): 315-324, which |
| | is incorporated by reference |
| REVERSE | MMDHLLQKTQIQNQTEQVMNITNPNSIYIKGRLYFKGYKKIELHCFVDTGASLCIA |
| TRANSCRIPTASE | SKFVIPEEHWINAERPIMVKIADGSSITINKVCRDIDLIIAGEIFHIPTVYQQESGIDFII |
| CAULIFLOWER | GNNFCQLYEPFIQFTDRVIFTKDRTYPVHIAKLTRAVRVGTEGFLESMKKRSKTQQP |
| MOSAIC VIRUS RT | EPVNISTNKIAILSEGRRLSEEKLFITQQRMQKIEELLEKVCSENPLDPNKTKQWMK |
| REF SEQ. | ASIKLSDPSKAIKVKPMKYSPMDREEFDKQIKELLDLKVIKPSKSPHMAPAFLVNNE |
| AGT42196 | AEKRRGKKRMVVNYKAMNKATVGDAYNLPNKDELLTLIRGKKIFSSFDCKSGFW |
| | QVLLDQDSRPLTAFTCPQGHYEWNVVPFGLKQAPSIFQRHMDEAFRVFRKFCCVY |
| | VDDILVFSNNEEDHLLHVAMILQKCNQHGIILSKKKAQLFKKKINFLGLEIDEGTHK |
| | PQGHILEHINKFPDTLEDKKQLQRFLGILTYASDYIPKLAQIRKPLQAKLKENVPWK |
| | WTKEDTLYMQKVKKNLQGFPPLHHPLPEEKLIIETDASDDYWGGMLKAIKINEGT |
| | NTELICRYASGSFKAAEKNYHSNDKETLAVINTIKKFSIYLTPVHFLIRTDNTHFKSF |
| | VNLNYKGDSKLGRNIRWQAWLSHYSFDVEHIKGTDNHFADELSREFNRVNS(SEQ |
| | ID NO: 74) |
| | See Farzadfar et al., Virus Genes, 2013, 47(2): 347-356, which |
| | is incorporated by reference |
| REVERSE | MKEKISKIDKNFYTDIFIKTSFQNEFEAGGVIPPIAKNQVSTISNKNKTFYSLAHSSPH |
| TRANSCRIPTASE | YSIQTRIEKELLKNIPLSASSFAFRKERSYLHYLEPHTQNVKYCHLDIVSFFHSIDVNI |
| KLEBSIELLA | VRDTFSVYFSDEFLVKEKQSLLDAFMASVTLTAELDGVEKTFIPMGFKSSPSISNIIF |
| PNEUMONIA | RKIDILIQKFCDKNKITYTRYADDLLFSTKKENNILSSTFFINEISSILSINKFKLNKSK |
| REF SEQ. | YLYKEGTISLGGYVIENILKDNSSGNIRLSSSKLNPLYKALYEIKKGSSSKHICIKVEN |
| RFF81513.1 | LKLKRFIYKKNKEKFEAKFYSSQLKNKLLGYRSYLLSFVIFHKKYKCINPIFLEKCVF |
| | LISEIESIMNRKF (SEQ ID NO: 75) |
| REVERSE | MKITSNNVTAVINGKGWHSINWKKCHQHVKTIQTRIAKAACNQQWRTVGRLQRL |
| TRANSCRIPTASE | LVRSFSARALAVKRVTENSGRKTPGVDGQIWSTPESKWEAIFKLRRKGYKPLPLKR |
| ESCHERICHIA | VFIPKSNGKKRPLGIPVMLDRAMQALHLLGLEPVSETNADHNSYGFRPARCTADAI |
| COLI RT | QQVCNMYSSRNASKWVLEGDIKGCFEHISHEWLLENIPMDKQILRNWLKAGIIEKS |
| REF SEQ. | IFSKTLSGTPQGGIISPVLANMALDGLERLLQNRFGRNRLI (SEQ ID NO: 76) |
| TGH57013 | |
| REVERSE | MSKIKINYEKYHIKPFPHFDQRIKVNKKVKENLQNPFYIAAHSFYPFIHYKKISYKFK |
| TRANSCRIPTASE | NGTLSSPKERDIFYSGHMDGYIYKHYGEILNHKYNNTCIGKGIDHVSLAYRNNKMG |
| BACILLUS | KSNIHFAAEVINFISEQQQAFIFVSDFSSYFDSLDHAILKEKLIEVLEEQDKLSKDWW |
| SUBTILIS RT | NVFKHITRYNWVEKEEVISDLECTKEKIARDKKSRERYYTPAEFREFRKRVNIKSND |
| REF SEQ. QBJ66766 | TGVGIPQGTAISAVLANVYAIDLDQKLNQYALKYGGIYRRYSDDIIMVLPMTSDGQ |
| | DPSNDHVSFIKSVVKRNKVTMGDSKTSVLYYANNNIYEDYQRKRESKMDYLGFSF |
| | DGMTVKIREKSLFKYYHRTYKKINSINWASVKKEKKVGRKKLYLLYSHLGRNYKG |
| | HGNFISYCKKAHAVFEGNKKIESLINQQIKRHWKKIQKRLVDV (SEQ ID NO: 77) |
| EUBACTERIUM | DTSNLMEQILSSDNLNRAYLQVVRNKGAEGVDGMKYTELKEHLAKNGETIKGQL |
| RECTALE GROUP | RTRKYKPQPARRVEIPKPDGGVRNLGVPTVTDRFIQQAIAQVLTPIYEEQFHDHSYG |
| II INTRON RT | FRPNRCAQQAILTALNIMNDGNDWIVDIDLEKFFDTVNHDKLMTLIGRTIKDGDVIS |
| | IVRKYLVSGIMIDDEYEDSIVGTPQGGNLSPLLANIMLNELDKEMEKRGLNFVRYA |
| | DDCIIMVGSEMSANRVMRNISRFIEEKLGLKVNMTKSKVDRPSGLKYLGFGFYFDP |
| | RAHQFKAKPHAKSVAKFKKRMKELTCRSWGVSNSYKVEKLNQLIRGWINYFKIGS |
| | MKTLCKELDSRIRYRLRMCIWKQWKTPQNQEKNLVKLGIDRNTARRVAYTGKRIA |
| | YVCNKGAVNVAISNKRLASFGLISMLDYYIEKCVTC (SEQ ID NO: 78) |
| GEOBACILLUS | ALLERILARDNLITALKRVEANQGAPGIDGVSTDQLRDYIRAHWSTIHAQLLAGTY |
| STEAROTHERMOPHILUS | RPAPVRRVEIPKPGGGTRQLGIPTVVDRLIQQAILQELTPIFDPDFSSSSFGFRPGRNA |
| GROUP II | HDAVRQAQGYIQEGYRYVVDMDLEKFFDRVNHDILMSRVARKVKDKRVLKLIRA |
| INTRON RT | YLQAGVMIEGVKVQTEEGTPQGQPLSPLLANILLDDLDKELEKRGLKFCRYADDC |
| | NIYVKSLRAGQRVKQSIQRFLEKTLKLKVNEEKSAVDRPWKRAFLGFSFTPERKAR |
| | IRLAPRSIQRLKQRIRQLTNPNWSISMPERIHRVNQYVMGWIGYFRLVETPSVLQTIE |
| | GWIRRRLRLCQWLQWKRVRTRIRELRALGLKETAVMEIANTRKGAWRTTKTPQL |
| | HQALGKTYWTAQGLKSLTQR (SEQ ID NO: 79) |

### Variant and Error-Prone RTs

[0461] Reverse transcriptases are essential for synthesizing complementary DNA (cDNA) strands from RNA templates. Reverse transcriptases are enzymes composed of distinct domains that exhibit different biochemical activities. The enzymes catalyze the synthesis of DNA from an RNA template, as follows: In the presence of an annealed primer, reverse transcriptase binds to an RNA template and initiates the polymerization reaction. RNA-dependent DNA polymerase activity synthesizes the complementary DNA (cDNA) strand, incorporating dNTPs. RNase H activity degrades the RNA template of the DNA:RNA complex. Thus, reverse transcriptases comprise (a) a binding activity that recognizes and binds to a RNA/DNA hybrid, (b) an RNA-dependent DNA polymerase activity, and (c) an RNase H activity. In addition, reverse transcriptases generally are regarded as having various attributes, including their thermostability, processivity (rate of dNTP incorporation), and fidelity (or error-rate). The reverse transcriptase variants contemplated herein may include any mutations to reverse transcriptase that impacts or changes any one or more of these enzymatic activities (e.g., RNA-dependent DNA polymerase activity, RNase H activity, or DNA/RNA hybrid-binding activity) or enzyme properties (e.g., thermostability, processivity, or fidelity). Such variants may be available in the art in the public domain, available commercially, or may be made using known methods of mutagenesis, including directed evolutionary processes (e.g., PACE or PANCE).

[0462] In various embodiments, the reverse transcriptase may be a variant reverse transcriptase. As used herein, a “variant reverse transcriptase” includes any naturally occurring or genetically engineered variant comprising one or more mutations (including singular mutations, inversions, deletions, insertions, and rearrangements) relative to a reference sequences (e.g., a reference wild type sequence). An RT may have several activities, including an RNA-dependent DNA polymerase activity, ribonuclease H activity, and DNA-dependent DNA polymerase activity. Collectively, these activities enable the enzyme to convert single-stranded RNA into double-stranded cDNA. In retroviruses and retrotransposons, this cDNA can then integrate into the host genome, from which new RNA copies can be made via host-cell transcription. Variant RT's may comprise a mutation which impacts one or more of these activities (either which reduces or increases these activities, or which eliminates these activities all together). In addition, variant RTs may comprise one or more mutations which render the RT more or less stable, less prone to aggregation, and facilitates purification and/or detection, and/or other the modification of properties or characteristics.

[0463] A person of ordinary skill in the art will recognize that variant reverse transcriptases derived from other reverse transcriptases, including but not limited to Moloney Murine Leukemia Virus (M-MLV); Human Immunodeficiency Virus (HIV) reverse transcriptase and avian Sarcoma-Leukosis Virus (ASLV) reverse transcriptase, which includes but is not limited to Rous Sarcoma Virus (RSV) reverse transcriptase, Avian Myeloblastosis Virus (AMV) reverse transcriptase, Avian Erythroblastosis Virus (AEV) Helper Virus MCAV reverse transcriptase, Avian Myelocytomatosis Virus MC29 Helper Virus MCAV reverse transcriptase, Avian Reticuloendotheliosis Virus (REV-T) Helper Virus REV-A reverse transcriptase, Avian Sarcoma Virus UR2 Helper Virus UR2AV reverse transcriptase, Avian Sarcoma Virus Y73 Helper Virus YAV reverse transcriptase, Rous Associated Virus (RAV) reverse transcriptase, and Myeloblastosis Associated Virus (MAV) reverse transcriptase may be suitably used in the subject methods and composition described herein.

[0464] One method of preparing variant RTs is by genetic modification (e.g., by modifying the DNA sequence of a wild-type reverse transcriptase). A number of methods are known in the art that permit the random as well as targeted mutation of DNA sequences (see for example, Ausubel et. al. Short Protocols in Molecular Biology (1995) 3.sup.rd Ed. John Wiley & Sons, Inc.). In addition, there are a number of commercially available kits for site-directed mutagenesis, including both conventional and PCR-based methods. Examples include the QuikChange Site-Directed Mutagenesis Kits (AGILENT®), the Q5® Site-Directed Mutagenesis Kit (NEW ENGLAND BIOLABS®), and GeneArt™ Site-Directed Mutagenesis System (THERMOFISHER SCIENTIFIC®).

[0465] In addition, mutant reverse transcriptases may be generated by insertional mutation or truncation (N-terminal, internal, or C-terminal insertions or truncations) according to methodologies known to one skilled in the art. The term “mutation,” as used herein, refers to a substitution of a residue within a sequence, e.g., a nucleic acid or amino acid sequence, with another residue, or a deletion or insertion of one or more residues within a sequence. Mutations are typically described herein by identifying the original residue followed by the position of the residue within the sequence and by the identity of the newly substituted residue. Various methods for making the amino acid substitutions (mutations) provided herein are well known in the art, and are provided by, for example, Green and Sambrook, Molecular Cloning: A Laboratory Manual ⁽⁴th ed., Cold Spring Harbor Laboratory Press, Cold Spring Harbor. N.Y. (2012)). Mutations can include a variety of categories, such as single base polymorphisms, microduplication regions, indel, and inversions, and is not meant to be limiting in any way. Mutations can include “loss-of-function” mutations which is the normal result of a mutation that reduces or abolishes a protein activity. Most loss-of-function mutations are recessive, because in a heterozygote the second chromosome copy carries an unmutated version of the gene coding for a fully functional protein whose presence compensates for the effect of the mutation. Mutations also embrace “gain-of-function” mutations, which is one which confers an abnormal activity on a protein or cell that is otherwise not present in a normal condition. Many gain-of-function mutations are in regulatory sequences rather than in coding regions, and can therefore have a number of consequences. For example, a mutation might lead to one or more genes being expressed in the wrong tissues, these tissues gaining functions that they normally lack. Because of their nature, gain-of-function mutations are usually dominant.

[0466] Older methods of site-directed mutagenesis known in the art rely on sub-cloning of the sequence to be mutated into a vector, such as an M13 bacteriophage vector, that allows the isolation of single-stranded DNA template. In these methods, one anneals a mutagenic primer (i.e., a primer capable of annealing to the site to be mutated but bearing one or more mismatched nucleotides at the site to be mutated) to the single-stranded template and then polymerizes the complement of the template starting from the 3′ end of the mutagenic primer. The resulting duplexes are then transformed into host bacteria and plaques are screened for the desired mutation.

[0467] More recently, site-directed mutagenesis has employed PCR methodologies, which have the advantage of not requiring a single-stranded template. In addition, methods have been developed that do not require sub-cloning. Several issues must be considered when PCR-based site-directed mutagenesis is performed. First, in these methods it is desirable to reduce the number of PCR cycles to prevent expansion of undesired mutations introduced by the polymerase. Second, a selection must be employed in order to reduce the number of non-mutated parental molecules persisting in the reaction. Third, an extended-length PCR method is preferred in order to allow the use of a single PCR primer set. And fourth, because of the non-template-dependent terminal extension activity of some thermostable polymerases it is often necessary to incorporate an end-polishing step into the procedure prior to blunt-end ligation of the PCR-generated mutant product.

[0468] Methods of random mutagenesis, which will result in a panel of mutants bearing one or more randomly situated mutations, exist in the art. Such a panel of mutants may then be screened for those exhibiting the desired properties, for example, increased stability, relative to a wild-type reverse transcriptase.

[0469] An example of a method for random mutagenesis is the so-called “error-prone PCR method.” As the name implies, the method amplifies a given sequence under conditions in which the DNA polymerase does not support high fidelity incorporation. Although the conditions encouraging error-prone incorporation for different DNA polymerases vary, one skilled in the art may determine such conditions for a given enzyme. A key variable for many DNA polymerases in the fidelity of amplification is, for example, the type and concentration of divalent metal ion in the buffer. The use of manganese ion and/or variation of the magnesium or manganese ion concentration may therefore be applied to influence the error rate of the polymerase.

[0470] In various aspects, the RT of the prime editors may be an “error-prone” reverse transcriptase variant. Error-prone reverse transcriptases that are known and/or available in the art may be used. The error-rate of any particular reverse transcriptase is a property of the enzyme's “fidelity,” which represents the accuracy of template-directed polymerization of DNA against its RNA template. An RT with high fidelity has a low-error rate. Conversely, an RT with low fidelity has a high-error rate. The fidelity of M-MLV-based reverse transcriptases are reported to have an error rate in the range of one error in 15,000 to 27,000 nucleotides synthesized. See Boutabout et al., “DNA synthesis fidelity by the reverse transcriptase of the yeast retrotransposon Ty1,” Nucleic Acids Res, 2001, 29: 2217-2222, which is incorporated by reference. Thus, for purposes of this application, those reverse transcriptases considered to be “error-prone” or which are considered to have an “error-prone fidelity” are those having an error rate that is less than one error in 15,000 nucleotides synthesized.

[0471] Error-prone reverse transcriptase also may be created through mutagenesis of a starting RT enzyme (e.g., a wild type M-MLV RT). The method of mutagenesis is not limited and may include directed evolution processes, such as phage-assisted continuous evolution (PACE) or phage-assisted noncontinuous evolution (PANCE). The term “phage-assisted continuous evolution (PACE),” as used herein, refers to continuous evolution that employs phage as viral vectors. The general concept of PACE technology has been described, for example, in International PCT Application, PCT/US2009/056194, filed Sep. 8, 2009, published as WO 2010/028347 on Mar. 11, 2010; international PCT Application. PCT/US2011/066747, filed Dec. 22, 2011, published as WO 2012/088381 on Jun. 28, 2012; U.S. Application, U.S. Pat. No. 9,023,594, issued May 5, 2015. International PCT Application, PCT/US2015/012022, filed Jan. 20, 2015, published as WO 2015/134121 on Sep. 11, 2015, and International PCT Application, PCT/US2016/027795, filed Apr. 15, 2016, published as WO 2016/168631 on Oct. 20, 2016, the entire contents of each of which are incorporated herein by reference.

[0472] Error-prone reverse transcriptases may also be obtain by phage-assisted non-continuous evolution (PANCE),” which as used herein, refers to non-continuous evolution that employs phage as viral vectors. PANCE is a simplified technique for rapid in vivo directed evolution using serial flask transfers of evolving ‘selection phage’ (SP), which contain a gene of interest to be evolved, across fresh E. coli host cells, thereby allowing genes inside the host E. coli to be held constant while genes contained in the SP continuously evolve. Serial flask transfers have long served as a widely-accessible approach for laboratory evolution of microbes, and, more recently, analogous approaches have been developed for bacteriophage evolution. The PANCE system features lower stringency than the PACE system.

[0473] Other error-prone reverse transcriptases have been described in the literature, each of which are contemplated for use in the herein methods and compositions. For example, error-prone reverse transcriptases have been described in Bebenek et al., “Error-prone Polymerization by HIV-1 Reverse Transcriptase,” J Biol Chem, 1993. Vol. 268: 10324-10334 and Sebastian-Martin et al., “Transcriptional inaccuracy threshold attenuates differences in RNA-dependent DNA synthesis fidelity between retroviral reverse transcriptases,” Scientific Reports, 2018, Vol. 8: 627, each of which are incorporated by reference. Still further, reverse transcriptases, including error-prone reverse transcriptases can be obtained from a commercial supplier, including ProtoScript® (II) Reverse Transcriptase, AMV Reverse Transcriptase, WarmStart® Reverse Transcriptase, and M-MuLV Reverse Transcriptase, all from NEW ENGLAND BIOLABS®, or AMV Reverse Transcriptase XL, SMARTScribe Reverse Transcriptase, GPR ultra-pure MMLV Reverse Transcriptase, all from TAKARA BIO USA, INC. (formerly CLONTECH).

[0474] The herein disclosure also contemplates reverse transcriptases having mutations in RNaseH domain. As mentioned above, one of the intrinsic properties of reverse transcriptases is the RNase H activity, which cleaves the RNA template of the RNA:cDNA hybrid concurrently with polymerization. The RNase H activity can be undesirable for synthesis of long cDNAs because the RNA template may be degraded before completion of full-length reverse transcription. The RNase H activity may also lower reverse transcription efficiency, presumably due to its competition with the polymerase activity of the enzyme. Thus, the present disclosure contemplates any reverse transcriptase variants that comprise a modified RNaseH activity. The herein disclosure also contemplates reverse transcriptases having mutations in the RNA-dependent DNA polymerase domain. As mentioned above, one of the intrinsic properties of reverse transcriptases is the RNA-dependent DNA polymerase activity, which incorporates the nucleobases into the nascent cDNA strand as coded by the template RNA strand of the RNA:cDNA hybrid. The RNA-dependent DNA polymerase activity can be increased or decreased (i.e., in terms of its rate of incorporation) to either increase or decrease the processivity of the enzyme. Thus, the present disclosure contemplates any reverse transcriptase variants that comprise a modified RNA-dependent DNA polymerase activity such that the processivity of the enzyme of either increased or decreased relative to an unmodified version.

[0475] Also contemplated herein are reverse transcriptase variants that have altered thermostability characteristics. The ability of a reverse transcriptase to withstand high temperatures is an important aspect of cDNA synthesis. Elevated reaction temperatures help denature RNA with strong secondary structures and/or high GC content, allowing reverse transcriptases to read through the sequence. As a result, reverse transcription at higher temperatures enables full-length cDNA synthesis and higher yields, which can lead to an improved generation of the 3′ flap ssDNA as a result of the prime editing process. Wild type M-MLV reverse transcriptase typically has an optimal temperature in the range of 37-48° C.; however, mutations may be introduced that allow for the reverse transcription activity at higher temperatures of over 48° C., including 49° C., 50° C., 51° C., 52° C., 53° C., 54° C., 55° C., 56° C., 57° C., 58° C., 59° C. 60° C., 61° C. 62° C., 63° C., 64° C., 65° C., 66° C., and higher.

[0476] The variant reverse transcriptases contemplated herein, including error-prone RTs, thermostable RTs, increase-processivity RTs, can be engineered by various routine strategies, including mutagenesis or evolutionary processes. In some cases, the variants can be produced by introducing a single mutation. In other cases, the variants may require more than one mutation. For those mutants comprising more than one mutation, the effect of a given mutation may be evaluated by introduction of the identified mutation to the wild-type gene by site-directed mutagenesis in isolation from the other mutations borne by the particular mutant. Screening assays of the single mutant thus produced will then allow the determination of the effect of that mutation alone.

[0477] Variant RT enzymes used herein may also include other “RT variants” having at least about 70% identical, at least about 80% identical, at least about 90% identical, at least about 95% identical, at least about 96% identical, at least about 97% identical, at least about 98% identical, at least about 99% identical, at least about 99.5% identical, or at least about 99.9% identical to any reference RT protein, including any wild type RT, or mutant RT, or fragment RT, or other variant of RT disclosed or contemplated herein or known in the art.

[0478] In some embodiments, an RT variant may have 1, 2, 3, 4, 5, 6, 7, 8, 9, 10, 11, 12, 13, 14, 15, 16, 17, 18, 19, 20, 21, 22, 21, 24, 25, 26, 27, 28, 29, 30, 31, 32, 33, 34, 35, 36, 37, 38, 39, 40, 41, 42, 43, 44, 45, 46, 47, 48, 49, 50, or up to 100, or up to 200, or up to 300, or up to 400, or up to 500 or more amino acid changes compared to a reference RT. In some embodiments, the RT variant comprises a fragment of a reference RT, such that the fragment is at least about 70% identical, at least about 80% identical, at least about 90% identical, at least about 95% identical, at least about 96% identical, at least about 97% identical, at least about 98% identical, at least about 99% identical, at least about 99.5% identical, or at least about 99.9% identical to the corresponding fragment of the reference RT. In some embodiments, the fragment is at least 30%, at least 35%, at least 40%, at least 45%, at least 50%, at least 55%, at least 60%, at least 65%, at least 70%, at least 75%, at least 80%, at least 85%, at least 90%, at least 95% identical, at least 96%, at least 97%, at least 98%, at least 99%, or at least 99.5% of the amino acid length of a corresponding wild type RT (M-MLV reverse transcriptase) (e.g., SEQ ID NO: 81) or to any of the reverse transcriptases of SEQ ID NOs: 69-79.

[0479] In some embodiments, the disclosure also may utilize RT fragments which retain their functionality and which are fragments of any herein disclosed RT proteins. In some embodiments, the RT fragment is at least 100 amino acids in length. In some embodiments, the fragment is at least 100, 150, 200, 250, 300, 350, 400, 450, 500, 550, or up to 600 or more amino acids in length.

[0480] In still other embodiments, the disclosure also may utilize RT variants which are truncated at the N-terminus or the C-terminus, or both, by a certain number of amino acids which results in a truncated variant which still retains sufficient polymerase function. In some embodiments, the RT truncated variant has a truncation of at least 1, at least 2, at least 3, at least 4, at least 5, at least 6, at least 7, at least 8, at least 9, at least 10, at least 11, at least 12, at least 13, at least 14, at least 15, at least 16, at least 17, at least 18, at least 19, at least 20, at least 21, at least 22, at least 23, at least 24, at least 25, at least 30, 40, 50, 60, 70, 80, 90, 100, 110, 120, 130, 140, 150, 160, 170, 180, 190, 200, 210, 220, 230, 240, or 250 amino acids at the N-terminal end of the protein. In other embodiments, the RT truncated variant has a truncation of at least 1, at least 2, at least 3, at least 4, at least 5, at least 6, at least 7, at least 8, at least 9, at least 10, at least 11, at least 12, at least 13, at least 14, at least 15, at least 16, at least 17, at least 18, at least 19, at least 20, at least 21, at least 22, at least 23, at least 24, at least 25, at least 30, 40, 50, 60, 70, 80, 90, 100, 110, 120, 130, 140, 150, 160, 170, 180, 190, 200, 210, 220, 230, 240, or 250 amino acids at the C-terminal end of the protein. In still other embodiments, the RT truncated variant has a truncation at the N-terminal and the C-terminal end which are the same or different lengths. For example, the prime editors utilized in the methods and compositions disclosed herein may include a truncated version of M-MLV reverse transcriptase. In this embodiment, the reverse transcriptase contains 4 mutations (D200N, T306K, W313F, T330P; noting that the L603W mutation present in PE2 is no longer present due to the truncation). The DNA sequence encoding this truncated editor is 522 bp smaller than PE2, and therefore makes its potentially useful for applications where delivery of the DNA sequence is challenging due to its size (i.e., adeno-associated virus and lentivirus delivery). This embodiment is referred to as MMLV-RT(trunc) and has the following amino acid sequence:

| | |
|---|---|
| MMLV-RT | TLNIEDEYRLHETSKEPDVSLGSTWLSDFPQAWAETGGMG |
| (TRUNC) | LAVRQAPLIIPLKATSTPVSIKQYPMSQEARLGIKPHIQR |
| | LLDQGILVPCQSPWNTPLLPVKKPGTNDYRPVQDLREVNK |
| | RVEDIHPTVPNPYNLLSGLPPSHQWYTVLDLKDAFFCLRL |
| | HPTSQPLFAFEWRDPEMGISGQLTWTRLPQGFKNSPTLFN |
| | EALHRDLADFRIQHPDLILLQYVDDLLLAATSELDCQQGT |
| | RALLQTLGNLGYRASAKKAQICQKQVKYLGYLLKEGQRWL |
| | TEARKETVMGQPTPKTPRQLREFLGKAGFCRLFIPGFAEM |
| | AAPLYPLTKPGTLFNWGPDQQKAYQEIKQALLTAPALGLP |
| | DLTKPFELFVDEKQGYAKGVLTQKLGPWRRPVAYLSKKLD |
| | PVAAGWPPCLRMVAAIAVLTKDAGKLTMGQPLVILAPHAV |
| | EALVKQPPDRWLSNARMTHYQALLLDTDRVQFGPVVALNP |
| | ATLLPLPEEGLQHNCLDNSRLIN |
| | (SEQ ID NO: 80) |

[0481] In various embodiments, the prime editors utilized in the methods and compositions disclosed herein may comprise one of the RT variants described herein, or a RT variant thereof having at least about 70% identical, at least about 80% identical, at least about 90% identical, at least about 95% identical, at least about 96% identical, at least about 97% identical, at least about 98% identical, at least about 99% identical, at least about 99.5% identical, or at least about 99.9% identical to any reference Cas9 variants. In still other embodiments, the present methods and compositions may utilize a DNA polymerase that has been evolved into a reverse transcriptase, as described in Effefson et al., “Synthetic evolutionary origin of a proofreading reverse transcriptase,” Science, Jun. 24, 2016, Vol. 352: 1590-1593, the contents of which are incorporated herein by reference.

[0482] In certain other embodiments, the reverse transcriptase is provided as a component of a fusion protein also comprising a napDNAbp. In other words, in some embodiments, the reverse transcriptase is fused to a napDNAbp as a fusion protein.

[0483] In various embodiments, variant reverse transcriptases can be engineered from wild type M-MLV reverse transcriptase as represented by SEQ ID NO: 81.

[0484] In various embodiments, the prime editors utilized in the methods and compositions described herein (with RT provided as either a fusion partner or in trans) can include a variant RT comprising one or more of the following mutations: P51L, S67K, E69K, L139P, T197A, D200N, H204R, F209N, E302K, E302R, T306K, F309N, W313F, T330P, L345G, L435G, N454K, D524G, E562Q, D583N, H594Q, L603W, E607K, or D653N in the wild type M-MLV RT of SEQ ID NO: 81 or at a corresponding amino acid position in another wild type RT polypeptide sequence.

[0485] Some exemplary reverse transcriptases that can be fused to napDNAbp proteins or provided as individual proteins according to various embodiments of this disclosure are provided below. Exemplary reverse transcriptases include variants with at least 80%, at least 85%, at least 90%, at least 95%, or at least 99% sequence identity to the following wild-type enzymes or partial enzymes:

| | Sequence (variant substitutions |
|---|---|
| Description | relative to wild type) |
| Reverse | TLNIEDEYRLHETSKEPDVSLGSTWLSDFPQAWAETGGMGLAVRQ |
| transcriptase (M- | APLIPLKATSTPVSIKQYPMSQEARLGIKPHIQRLLDQGILVPCQ |
| MLV RT) wild | SPWNTPLLPVKKPGTNDYRPVQDLREVNKRVEDIHPTVPNPYNLL |
| type | SGLPPSHQWYTVLDLKDAFFCLRLHPTSQPLFAFEWRDPEMGISG |
| Moloney murine | QLTWTRLPQGFKNSPTLFDEALHRDLADFRIQHPDLILLQYVDDL |
| leukemia Virus | LLAATSELDCQQGTRALLQTLGNLGYRASAKKAQICQKQVKYLGY |
| Used in PE1 | LLKEGQRWLTEARKETVMGQPTPKTPRQLREFLGTAGFCRLWIPG |
| (prime editor 1 | FAEMAAPLYPLTKTGTLFNWGPDQQKAYQEIKQALLTAPALGLPD |
| fusion protein | LTKPFELFVDEKQGYAKGVLTQKLGPWRRPVAYLSKKLDPVAAGW |
| disclosed herein) | PPCLRMVAAIAVLTKDAGKLTMGQPLVILAPHAVEALVKQPPDRW |
| | LSNARMTHYQALLLDTDRVQFGPVVALNPATLLPLPEEGLQHNCL |
| | DILAEAHGTRPDLTDQPLPDADHTWYTDGSSLLQEGQRKAGAAVT |
| | TETEVIWAKALPAGTSAQRAELIALTQALKMAEGKKLNVYTDSRY |
| | AFATAHIHGEIYRRRGLLTSEGKEIKNKDEILALLKALFLPKRLS |
| | IIHCPGHQKGHSAEARGNRMADQAARKAAITETPDTSTLLIENSS |
| | P |
| | (SEQ ID NO: 81) |
| M-MLV RT | TLNIEDEYRLHETSKEPDVSLGSTWLSDFPQAWAETGGMGLAVRQ |
| D200N | APLIIPLKATSTPVSIKQYPMSQEARLGIKPHIQRLLDQGILVPC |
| | QSPWNTPLLPVKKPGTNDYRPVQDLREVNKRVEDIHPTVPNPYNL |
| | LSGLPPSHQWYTVLDLKDAFFCLRLHPTSQPLFAFEWRDPEMGIS |
| | GQLTWTRLPQGFKNSPTLFNEALHRDLADFRIQHPDLILLQYVDD |
| | LLLAATSELDCQQGTRALLQTLGNLGYRASAKKAQICQKQVKYLG |
| | YLLKEGQRWLTEARKETVMGQPTPKTPRQLREFLGTAGFCRLWIP |
| | GFAEMAAPLYPLIKTGTLENWGPDQQKAYQEIKQALLTAPALGLP |
| | DLTKPFELFVDEKQGYAKGVLTQKLGPWRRPVAYLSKKLDPVAAG |
| | WPPCLRMVAAIAVLTKDAGKLTMGQPLVILAPHAVEALVKQPPDR |
| | WLSNARMTHYQALLLDTDRVQFGPVVALNPATLLPLPEEGLQHNC |
| | LDILAEAHGTRPDLTDQPLPDADHTWYTDGSSLLQEGQRKAGAAV |
| | TTETEVIWAKALPAGTSAQRAELIALTQALKMAEGKKLNVYTDSR |
| | YAFATAHIHGEIYRRRGLLTSEGKEIKNKDEILALLKALFLPKRL |
| | SIIHCPGHQKGHSAEARGNRMADQAARKAAITETPDTSTLLIENS |
| | SP |
| | (SEQ ID NO: 82) |
| M-MLV RT | TLNIEDEYRLHETSKEPDVSLGSTWLSDFPQAWAETGGMGLAVRQ |
| D200N | APLIIPLKATSTPVSIKQYPMSQEARLGIKPHIQRLLDQGILVPC |
| T330P | QSPWNTPLLPVKKPGTNDYRPVQDLREVNKRVEDIHPTVPNPYNL |
| | LSGLPPSHQWYTVLDLKDAFFCLRLHPTSQPLFAFEWRDPEMGIS |
| | GQLTWTRLPQGFKNSPTLFNEALHRDLADFRIQHPDLILLQYVDD |
| | LLLAATSELDCQQGTRALLQTLGNLGYRASAKKAQICQKQVKYLG |
| | YLLKEGQRWLTEARKETVMGQPTPKTPRQLREFLGTAGFCRLWIP |
| | GFAEMAAPLYPLTKPGTLFNWGPDQQKAYQEIKQALLTAPALGLP |
| | DLTKPFELFVDEKQGYAKGVLTQKLGPWRRPVAYLSKKLDPVAAG |
| | WPPCLRMVAAIAVLTKDAGKLTMGQPLVILAPHAVEALVKQPPDR |
| | WLSNARMTHYQALLLDTDRVQFGPVVALNPATLLPLPEEGLQHNC |
| | LDILAEAHGTRPDLTDQPLPDADHTWYTDGSSLLQEGQRKAGAAV |
| | TTETEVIWAKALPAGTSAQRAELIALTQALKMAEGKKLNVYTDSR |
| | YAFATAHIHGEIYRRRGLLTSEGKEIKNKDEILALLKALFLPKRL |
| | SIIHCPGHQKGHSAEARGNRMADQAARKAAITETPDTSTLLIENS |
| | SP |
| | (SEQ ID NO: 83) |
| M-MLV RT | TLNIEDEYRLHETSKEPDVSLGSTWLSDFPQAWAETGGMGLAVRQ |
| D200N | APLIIPLKATSTPVSIKQYPMSQEARLGIKPHIQRLLDQGILVPC |
| T330P | QSPWNTPLLPVKKPGTNDYRPVQDLREVNKRVEDIHPTVPNPYNL |
| L603W | LSGLPPSHQWYTVLDLKDAFFCLRLHPTSQPLFAFEWRDPEMGIS |
| | GQLTWTRLPQGFKNSPTLFNEALHRDLADFRIQHPDLILLQYVDD |
| | LLLAATSELDCQQGTRALLQTLGNLGYRASAKKAQICQKQVKYLG |
| | YLLKEGQRWLTEARKETVMGQPTPKTPRQLREFLGTAGFCRLWIP |
| | GFAEMAAPLYPLTKPGTLFNWGPDQQKAYQEIKQALLTAPALGLP |
| | DLTKPFELFVDEKQGYAKGVLTQKLGPWRRPVAYLSKKLDPVAAG |
| | WPPCLRMVAAIAVLTKDAGKLTMGQPLVILAPHAVEALVKQPPDR |
| | WLSNARMTHYQALLLDTDRVQFGPVVALNPATLLPLPEEGLQHNC |
| | LDILAEAHGTRPDLTDQPLPDADHTWYTDGSSLLQEGQRKAGAAV |
| | TTETEVIWAKALPAGTSAQRAELIALTQALKMAEGKKLNVYTDSR |
| | YAFATAHIHGEIYRRRGWLTSEGKEIKNKDEILALLKALFLPKRL |
| | SIIHCPGHQKGHSAEARGNRMADQAARKAAITETPDTSTLLIENS |
| | SP |
| | (SEQ ID NO: 84) |
| M-MLV RT | TLNIEDEYRLHETSKEPDVSLGSTWLSDFPQAWAETGGMGLAVRQ |
| D200N | APLIIPLKATSTPVSIKQYPMSQKARLGIKPHIQRLLDQGILVPC |
| T330P | QSPWNTPLLPVKKPGTNDYRPVQDLREVNKRVEDIHPTVPNPYNL |
| L603W | LSGLPPSHQWYTVLDLKDAFFCLRLHPTSQPLFAFEWRDPEMGIS |
| E69K | GQLTWTRLPQGFKNSPTLFNEALHRDLADFRIQHPDLILLQYVDD |
| | LLLAATSELDCQQGTRALLQTLGNLGYRASAKKAQICQKQVKYLG |
| | YLLKEGQRWLTEARKETVMGQPTPKTPRQLREFLGTAGFCRLWIP |
| | GFAEMAAPLYPLTKPGTLFNWGPDQQKAYQEIKQALLTAPALGLP |
| | DLTKPFELFVDEKQGYAKGVLTQKLGPWRRPVAYLSKKLDPVAAG |
| | WPPCLRMVAAIAVLTKDAGKLTMGQPLVILAPHAVEALVKQPPDR |
| | WLSNARMTHYQALLLDTDRVQFGPVVALNPATLLPLPEEGLQHNC |
| | LDILAEAHGTRPDLTDQPLPDADHTWYTDGSSLLQEGQRKAGAAV |
| | TTETEVIWAKALPAGTSAQRAELIALTQALKMAEGKKLNVYTDSR |
| | YAFATAHIHGEIYRRRGWLTSEGKEIKNKDEILALLKALFLPKRL |
| | SIIHCPGHQKGHSAEARGNRMADQAARKAAITETPDTSTLLIENS |
| | SP |
| | (SEQ ID NO: 85) |
| M-MLV RT | TLNIEDEYRLHETSKEPDVSLGSTWLSDFPQAWAETGGMGLAVRQ |
| D200N | APLIIPLKATSTPVSIKQYPMSQEARLGIKPHIQRLLDQGILVPC |
| T330P | QSPWNTPLLPVKKPGTNDYRPVQDLREVNKRVEDIHPTVPNPYNL |
| L603W | LSGLPPSHQWYTVLDLKDAFFCLRLHPTSQPLFAFEWRDPEMGIS |
| E302R | GQLTWTRLPQGFKNSPTLFNEALHRDLADFRIQHPDLILLQYVDD |
| | LLLAATSELDCQQGTRALLQTLGNLGYRASAKKAQICQKQVKYLG |
| | YLLKEGQRWLTEARKETVMGQPTPKTPRQLRRFLGTAGFCRLWIP |
| | GFAEMAAPLYPLTKPGTLFNWGPDQQKAYQEIKQALLTAPALGLP |
| | DLTKPFELFVDEKQGYAKGVLTQKLGPWRRPVAYLSKKLDPVAAG |
| | WPPCLRMVAAIAVLTKDAGKLTMGQPLVILAPHAVEALVKQPPDR |
| | WLSNARMTHYQALLLDTDRVQFGPVVALNPATLLPLPEEGLQHNC |
| | LDILAEAHGTRPDLTDQPLPDADHTWYTDGSSLLQEGQRKAGAAV |
| | TTETEVIWAKALPAGTSAQRAELIALTQALKMAEGKKLNVYTDSR |
| | YAFATAHIHGEIYRRRGWLTSEGKEIKNKDEILALLKALFLPKRL |
| | SIIHCPGHQKGHSAEARGNRMADQAARKAAITETPDTSTLLIENS |
| | SP |
| | (SEQ ID NO: 86) |
| M-MLV RT | TLNIEDEYRLHETSKEPDVSLGSTWLSDFPQAWAETGGMGLAVRQ |
| D200N | APLIIPLKATSTPVSIKQYPMSQEARLGIKPHIQRLLDQGILVPC |
| T330P | QSPWNTPLLPVKKPGTNDYRPVQDLREVNKRVEDIHPTVPNPYNL |
| L603W | LSGLPPSHQWYTVLDLKDAFFCLRLHPTSQPLFAFEWRDPEMGIS |
| E607K | GQLTWTRLPQGFKNSPTLFNEALHRDLADFRIQHPDLILLQYVDD |
| | LLLAATSELDCQQGTRALLQTLGNLGYRASAKKAQICQKQVKYLG |
| | YLLKEGQRWLTEARKETVMGQPTPKTPRQLREFLGTAGFCRLWIP |
| | GFAEMAAPLYPLTKPGTLENWGPDQQKAYQEIKQALLTAPALGLP |
| | DLTKPFELFVDEKQGYAKGVLTQKLQPWRRPVAYLSKKLDPVAAG |
| | WPPCLRMVAAIAVLTKDAGKLTMGQPLVILAPHAVEALVKQPPDR |
| | WLSNARMTHYQALLLDTDRVQFGPVVALNPATLLPLPEEGLQHNC |
| | LDILAEAHGTRPDLTDQPLPDADHTWYTDGSSLLQEGQRKAGAAV |
| | TTETEVIWAKALPAGTSAQRAELIALTQALKMAEGKKLNVYTDSR |
| | YAFATAHIHGEIYRRRGWLTSKGKEIKNKDEILALLKALFLPKRL |
| | SIIHCPGHQKGHSAEARGNRMADQAARKAAITETPDTSTLLIENS |
| | SP |
| | (SEQ ID NO: 87) |
| M-MLV RT | TLNIEDEYRLHETSKEPDVSLGSTWLSDFPQAWAETGGMGLAVRQ |
| D200N | APLIIPLKATSTPVSIKQYPMSQEARLGIKPHIQRLLDQGILVPC |
| T330P | QSPWNTPLLPVKKPGTNDYRPVQDLREVNKRVEDIHPTVPNPYNL |
| L603W | LSGPPPSHQWYTVLDLKDAFFCLRLHPTSQPLFAFEWRDPEMGIS |
| L139P | GQLTWTRLPQGFKNSPTLFNEALHRDLADFRIQHPDLILLQYVDD |
| | LLLAATSELDCQQGTRALLQTLGNLGYRASAKKAQICQKQVKYLG |
| | YLLKEGQRWLTEARKETVMGQPTPKTPRQLREFLGTAGFCRLWIP |
| | GFAEMAAPLYPLTKPGTLFNWGPDQQKAYQEIKQALLTAPALGLP |
| | DLTKPFELFVDEKQGYAKGVLTQKLGPWRRPVAYLSKKLDPVAAG |
| | WPPCLRMVAAIAVLTKDAGKLTMGQPLVILAPHAVEALVKQPPDR |
| | WLSNARMTHYQALLLDTDRVQFGPVVALNPATLLPLPEEGLQHNC |
| | LDILAEAHGTRPDLTDQPLPDADHTWYTDGSSLLQEGQRKAGAAV |
| | TTETEVIWAKALPAGTSAQRAELIALTQALKMAEGKKLNVYTDSR |
| | YAFATAHIHGEIYRRRGWLTSEGKEIKNKDEILALLKALFLPKRL |
| | SIIHCPGHQKGHSAEARGNRMADQAARKAAITETPDTSTLLIENS |
| | SP |
| | (SEQ ID NO: 88) |
| M-MLV RT | TLNIEDEYRLHETSKEPDVSLGSTWLSDFPQAWAETGGMGLAVRQ |
| D200N | APLIIPLKATSTPVSIKQYPMSQEARLGIKPHIQRLLDQGILVPC |
| T330P | QSPWNTPLLPVKKPGTNDYRPVQDLREVNKRVEDIHPTVPNPYNL |
| L603W | LSGLPPSHQWYTVLDLKDAFFCLRLHPTSQPLFAFEWRDPEMGIS |
| LA35G | GQLTWTRLPQGFKNSPTLFNEALHRDLADFRIQHPDLILLQYVDD |
| | LLLAATSELDCQQGTRALLQTLGNLGYRASAKKAQICQKQVKYLG |
| | YLLKEGQRWLTEARKETVMGQPTPKTPRQLREFLGTAGFCRLWIP |
| | GFAEMAAPLYPLTKPGTLENWGPDQQKAYQEIKQALLTAPALGLP |
| | DLTKPFELFVDEKQGYAKGVLTQKLGPWRRPVAYLSKKLDPVAAG |
| | WPPCLRMVAAIAVLTKDAGKLTMGQPLVIGAPHAVEALVKQPPDR |
| | WLSNARMTHYQALLLDTDRVQFGPVVALNPATLLPLPEEGLQHNC |
| | LDILAEAHGTRPDLTDQPLPDADHTWYTDGSSLLQEGQRKAGAAV |
| | TTETEVIWAKALPAGTSAQRAELIALTQALKMAEGKKLNVYTDSR |
| | YAFATAHIHGEIYRRRGWLTSEGKEIKNKDEILALLKALFLPKRL |
| | SIIHCPGHQKGHSAEARGNRMADQAARKAAITETPDTSTLLIENS |
| | SP |
| | (SEQ ID NO: 89) |
| M-MLV RT | TLNIEDEYRLHETSKEPDVSLGSTWLSDFPQAWAETGGMGLAVRQ |
| D200N | APLIIPLKATSTPVSIKQYPMSQEARLGIKPHIQRLLDQGILVPC |
| T330P | QSPWNTPLLPVKKPGTNDYRPVQDLREVNKRVEDIHPTVPNPYNL |
| L603W | LSGLPPSHQWYTVLDLKDAFFCLRLHPTSQPLFAFEWRDPEMGIS |
| N454K | GQLTWTRLPQGFKNSPTLFNEALHRDLADFRIQHPDLILLQYVDD |
| | LLLAATSELDCQQGTRALLQTLGNLGYRASAKKAQICQKQVKYLG |
| | YLLKEGQRWLTEARKETVMGQPTPKTPRQLREFLGTAGFCRLWIP |
| | GFAEMAAPLYPLTKPGTLENWGPDQQKAYQEIKQALLTAPALGLP |
| | DLTKPFELFVDEKQGYAKGVLTQKLGPWRRPVAYLSKKLDPVAAG |
| | WPPCLRMVAAIAVLTKDAGKLTMGQPLVILAPHAVEALVKQPPDR |
| | WLSKARMTHYQALLLDTDRVQFGPVVALNPATLLPLPEEGLQHNC |
| | LDILAEAHGTRPDLTDQPLPDADHTWYTDGSSLLQEGQRKAGAAV |
| | TTETEVIWAKALPAGTSAQRAELIALTQALKMAEGKKLNVYTDSR |
| | YAFATAHIHGEIYRRRGWLTSEGKEIKNKDEILALLKALFLPKRL |
| | SIIHCPGHQKGHSAEARGNRMADQAARKAAITETPDTSTLLIENS |
| | SP |
| | (SEQ ID NO: 90) |
| M-MLV RT | TLNIEDEYRLHETSKEPDVSLGSTWLSDFPQAWAETGGMGLAVRQ |
| D200N | APLIIPLKATSTPVSIKQYPMSQEARLGIKPHIQRLLDQGILVPC |
| T330P | QSPWNTPLLPVKKPGTNDYRPVQDLREVNKRVEDIHPTVPNPYNL |
| L603W | LSGLPPSHQWYTVLDLKDAFFCLRLHPTSQPLFAFEWRDPEMGIS |
| T306K | GQLTWTRLPQGFKNSPTLFNEALHRDLADFRIQHPDLILLQYVDD |
| | LLLAATSELDCQQGTRALLQTLGNLGYRASAKKAQICQKQVKYLG |
| | YLLKEGQRWLTEARKETVMGQPTPKTPRQLREFLGKAGFCRLWIP |
| | GFAEMAAPLYPLTKPGTLFNWGPDQQKAYQEIKQALLTAPALGLP |
| | DLTKPFELFVDEKQGYAKGVLTQKLGPWRRPVAYLSKKLDPVAAG |
| | WPPCLRMVAAIAVLTKDAGKLTMGQPLVILAPHAVEALVKQPPDR |
| | WLSNARMTHYQALLLDTDRVQFGPVVALNPATLLPLPEEGLQHNC |
| | LDILAEAHGTRPDLTDQPLPDADHTWYTDGSSLLQEGQRKAGAAV |
| | TTETEVIWAKALPAGTSAQRAELIALTQALKMAEGKKLNVYTDSR |
| | YAFATAHIHGEIYRRRGWLTSEGKEIKNKDEILALLKALFLPKRL |
| | SIIHCPGHQKGHSAEARGNRMADQAARKAAITETPDTSTLLIENS |
| | SP |
| | (SEQ ID NO: 91) |
| M-MLV RT | TLNIEDEYRLHETSKEPDVSLGSTWLSDFPQAWAETGGMGLAVRQ |
| D200N | APLIIPLKATSTPVSIKQYPMSQEARLGIKPHIQRLLDQGILVPC |
| T330P | QSPWNTPLLPVKKPGTNDYRPVQDLREVNKRVEDIHPTVPNPYNL |
| L603W | LSGLPPSHQWYTVLDLKDAFFCLRLHPTSQPLFAFEWRDPEMGIS |
| W313F | GQLTWTRLPQGFKNSPTLFNEALHRDLADFRIQHPDLILLQYVDD |
| | LLLAATSELDCQQGTRALLQTLGNLGYRASAKKAQICQKQVKYLG |
| | YLLKEGQRWLTEARKETVMGQPTPKTPRQLREFLGTAGFCRLFIP |
| | GFAEMAAPLYPLTKPGTLENWGPDQQKAYQEIKQALLTAPALGLP |
| | DLTKPFELFVDEKQGYAKGVLTQKLGPWRRPVAYLSKKLDPVAAG |
| | WPPCLRMVAAIAVLTKDAGKLTMGQPLVILAPHAVEALVKQPPDR |
| | WLSNARMTHYQALLLDTDRVQFGPVVALNPATLLPLPEEGLQHNC |
| | LDILAEAHGTRPDLTDQPLPDADHTWYTDGSSLLQEGQRKAGAAV |
| | TTETEVIWAKALPAGTSAQRAELIALTQALKMAEGKKLNVYTDSR |
| | YAFATAHIHGEIYRRRGWLTSEGKEIKNKDEILALLKALFLPKRL |
| | SIIHCPGHQKGHSAEARGNRMADQAARKAAITETPDTSTLLIENS |
| | SP |
| | (SEQ ID NO: 92) |
| M-MLV RT | TLNIEDEYRLHETSKEPDVSLGSTWLSDFPQAWAETGGMGLAVRQ |
| D200N | APLIIPLKATSTPVSIKQYPMSQEARLGIKPHIQRLLDQGILVPC |
| T330P | QSPWNTPLLPVKKPGTNDYRPVQDLREVNKRVEDIHPTVPNPYNL |
| L603W | LSGLPPSHQWYTVLDLKDAFFCLRLHPTSQPLFAFEWRDPEMGIS |
| D524G | GQLTWTRLPQGFKNSPTLFNEALHRDLADFRIQHPDLILLQYVDD |
| E562Q | LLLAATSELDCQQGTRALLQTLGNLGYRASAKKAQICQKQVKYLG |
| D583N | YLLKEGQRWLTEARKETVMGQPTPKTPRQLREFLGTAGFCRLWIP |
| | GFAEMAAPLYPLTKPGTLENWGPDQQKAYQEIKQALLTAPALGLP |
| | DLTKPFELFVDEKQGYAKGVLTQKLGPWRRPVAYLSKKLDPVAAG |
| | WPPCLRMVAAIAVLTKDAGKLTMGQPLVILAPHAVEALVKQPPDR |
| | WLSNARMTHYQALLLDTDRVQFGPVVALNPATLLPLPEEGLQHNC |
| | LDILAEAHGTRPDLTDQPLPDADHTWYTGGSSLLQEGQRKAGAAV |
| | TTETEVIWAKALPAGTSAQRAQLIALTQALKMAEGKKLNVYTNSR |
| | YAFATAHIHGEIYRRRGWLTSEGKEIKNKDEILALLKALFLPKRL |
| | SIIHCPGHQKGHSAEARGNRMADQAARKAAITETPDTSTLLIENS |
| | SP |
| | (SEQ ID NO: 93) |
| M-MLV RT | TLNIEDEYRLHETSKEPDVSLGSTWLSDFPQAWAETGGMGLAVRQ |
| D200N | APLIIPLKATSTPVSIKQYPMSQEARLGIKPHIQRLLDQGILVPC |
| T330P | QSPWNTPLLPVKKPGTNDYRPVQDLREVNKRVEDIHPTVPNPYNL |
| L603W | LSGLPPSHQWYTVLDLKDAFFCLRLHPTSQPLFAFEWRDPEMGIS |
| E302R | GQLTWTRLPQGFKNSPTLFNEALHRDLADFRIQHPDLILLQYVDD |
| W313F | LLLAATSELDCQQGTRALLQTLGNLGYRASAKKAQICQKQVKYLG |
| | YLLKEGQRWLTEARKETVMGQPTPKTPRQLRRFLGTAGFCRLFIP |
| | GFAEMAAPLYPLTKPGTLFNWGPDQQKAYQEIKQALLTAPALGLP |
| | DLTKPFELFVDEKQGYAKGVLTQKLGPWRRPVAYLSKKLDPVAAG |
| | WPPCLRMVAAIAVLTKDAGKLTMGQPLVILAPHAVEALVKQPPDR |
| | WLSNARMTHYQALLLDTDRVQFGPVVALNPATLLPLPEEGLQHNC |
| | LDILAEAHGTRPDLTDQPLPDADHTWYTDGSSLLQEGQRKAGAAV |
| | TTETEVIWAKALPAGTSAQRAELIALTQALKMAEGKKLNVYTDSR |
| | YAFATAHIHGEIYRRRGWLTSEGKEIKNKDEILALLKALFLPKRL |
| | SIIHCPGHQKGHSAEARGNRMADQAARKAAITETPDTSTLLIENS |
| | SP |
| | (SEQ ID NO: 94) |
| M-MLV RT | TLNIEDEYRLHETSKEPDVSLGSTWLSDFPQAWAETGGMGLAVRQ |
| D200N | APLIIPLKATSTPVSIKQYPMSQEARLGIKPHIQRLLDQGILVPC |
| T330P | QSPWNTPLLPVKKPGTNDYRPVQDLREVNKRVEDIHPTVPNPYNL |
| L603W | LSGPPPSHQWYTVLDLKDAFFCLRLHPTSQPLFAFEWRDPEMGIS |
| E607K | GQLTWTRLPQGFKNSPTLFNEALHRDLADFRIQHPDLILLQYVDD |
| L139P | LLLAATSELDCQQGTRALLQTLGNLGYRASAKKAQICQKQVKYLG |
| | YLLKEGQRWLTEARKETVMGQPTPKTPRQLREFLGTAGFCRLWIP |
| | GFAEMAAPLYPLTKPGTLFNWGPDQQKAYQEIKQALLTAPALGLP |
| | DLTKPFELFVDEKQGYAKGVLTQKLGPWRRPVAYLSKKLDPVAAG |
| | WPPCLRMVAAIAVLTKDAGKLTMGQPLVILAPHAVEALVKQPPDR |
| | WLSNARMTHYQALLLDTDRVQFGPVVALNPATLLPLPEEGLQHNC |
| | LDILAEAHGTRPDLTDQPLPDADHTWYTDGSSLLQEGQRKAGAAV |
| | TTETEVIWAKALPAGTSAQRAELIALTQALKMAEGKKLNVYTDSR |
| | YAFATAHIHGEIYRRRGWLTSKGKEIKNKDEILALLKALFLPKRL |
| | SIHCPGHQKGHSAEARGNRMADQAARKAAITETPDTSTLLIENSS |
| | P |
| | (SEQ ID NO: 95) |
| M-MLV RT | TLNIEDEYRLHETSKEPDVSLGSTWLSDFPQAWAETGGMGLAVRQ |
| PS1L S67K | APLIILLKATSTPVSIKQYPMKQEARLGIKPHIQRLLDQGILVPC |
| T197A H204R | QSPWNTPLLPVKKPGTNDYRPVQDLREVNKRVEDIHPTVPNPYNL |
| E302K F309N | LSGLPPSHQWYTVLDLKDAFFCLRLHPTSQPLFAFEWRDPEMGIS |
| W313FT330P | GQLTWTRLPQGFKNSPALFDEALRRDLADFRIQHPDLILLQYVDD |
| L435G N454K | LLLAATSELDCQQGTRALLQTLGNLQYRASAKKAQICQKQVKYLG |
| D524G D583N | YLLKEGQRWLTEARKETVMGQPTPKTPRQLRKFLGTAGNCRLFIP |
| H594Q D653N | GFAEMAAPLYPLTKPGTLFNWGPDQQKAYQEIKQALLTAPALGLP |
| | DLTKPFELFVDEKQGYAKGVLTQKLGPWRRPVAYLSKKLDPVAAG |
| | WPPCLRMVAAIAVLTKDAGKLTMGQPLVIGAPHAVEALVKQPPDR |
| | WLSKARMTHYQALLLDTDRVQFGPVVALNPATLLPLPEEGLQHNC |
| | LDILAEAHGTRPDLTDQPLPDADHTWYTGGSSLLQEGQRKAGAAV |
| | TTETEVIWAKALPAGTSAQRAELIALTQALKMAEGKKLNVYTNSR |
| | YAFATAHIQGETYRRRGLLTSEGKEIKNKDEILALLKALFLPKRL |
| | SIIHCPGHQKGHSAEARGNRMANQAARKAAITETPDTSTLLIENS |
| | SP |
| | (SEQ ID NO: 96) |
| M-MLV RT | TLNIEDEYRLHETSKEPDVSLGSTWLSDFPQAWAETGGMGLAVRQ |
| D200N P51L | APLIILLKATSTPVSIKQYPMKQEARLGIKPHIQRLLDQGILVPC |
| S67K T197A | QSPWNTPLLPVKKPGTNDYRPVQDLREVNKRVEDIHPTVPNPYNL |
| H204R E302K | LSGLPPSHQWYTVLDLKDAFFCLRLHPTSQPLFAFEWRDPEMGIS |
| F309N W313F | GQLTWTRLPQGFKNSPALFNEALRRDLADFRIQHPDLILLQYVDD |
| T330P L345G | LLLAATSELDCQQGTRALLQTLGNLGYRASAKKAQICQKQVKYLG |
| N454K D524G | YLLKEGQRWLTEARKETVMGQPTPKTPRQLRKFLGTAGNCRLFIP |
| D583N H594Q | GFAEMAAPLYPLTKPGTLFNWGPDQQKAYQEIKQALLTAPALGLP |
| D653N | DLTKPFELFVDEKQGYAKGVLTQKLGPWRRPVAYLSKKLDPVAAG |
| | WPPCLRMVAAIAVLTKDAGKLTMGQPLVIGAPHAVEALVKQPPDR |
| | WLSKARMTHYQALLLDTDRVQFGPVVALNPATLLPLPEEGLQHNC |
| | LDILAEAHGTRPDLTDQPLPDADHTWYTGGSSLLQEGQRKAGAAV |
| | TTETEVIWAKALPAGTSAQRAELIALTQALKMAEGKKLNVYTNSR |
| | YAFATAHIQGETYRRRGLLTSEGKEIKNKDEILALLKALFLPKRL |
| | SIIHCPGHQKGHSAEARGNRMANQAARKAAITETPDTSTLLIENS |
| | SP |
| | (SEQ ID NO: 97) |
| M-MLV RT | TLNIEDEYRLHETSKEPDVSLGSTWLSDFPQAWAETGGMGLAVRQ |
| D200N T330P | APLIPLKATSTPVSIKQYPMSQEARLGIKPHIQRLLDQGILVPCQ |
| L603W T306K | SPWNTPLLPVKKPGTNDYRPVQDLREVNKRVEDIHPTVPNPYNLL |
| W313F | SGLPPSHQWYTVLDLKDAFFCLRLHPTSQPLFAFEWRDPEMGISG |
| in PE2 | QLTWTRLPQGFKNSPTLFNEALHRDLADFRIQHPDLILLQYVDDL |
| | LLAATSELDCQQGTRALLQTLGNLGYRASAKKAQICQKQVKYLGY |
| | LLKEGQRWLTEARKETVMGQPTPKTPRQLREFLGKAGFCRLFIPG |
| | FAEMAAPLYPLTKPGTLFNWGPDQQKAYQEIKQALLTAPALGLPD |
| | LTKPFELFVDEKQGYAKGVLTQKLGPWRRPVAYLSKKLDPVAAGW |
| | PPCLRMVAAIAVLTKDAGKLTMGQPLVILAPHAVEALVKQPPDRW |
| | LSNARMTHYQALLLDTDRVQFGPVVALNPATLLPLPEEGLQHNCL |
| | DILAEAHGTRPDLTDQPLPDADHTWYTDGSSLLQEGQRKAGAAVT |
| | TETEVIWAKALPAGTSAQRAELIALTQALKMAEGKKLNVYTDSRY |
| | AFATAHIHGEIYRRRGWLTSEGKEIKNKDEILALLKALFLPKRLS |
| | IIHCPGHQKGHSAEARGNRMADQAARKAAITETPDTSTLLIENSS |
| | P |
| | (SEQ ID NO: 98) |

[0486] In various other embodiments, the prime editors utilized in the methods and compositions described herein (with RT provided as either a fusion partner or in trans) can include a variant RT comprising one or more of the following mutations: P51X, S67X, E69X, L139X, T197X, D200X, H204X, F209X, E302X, T306X, F309X. W313X. T330X, L345X, L435X, N454X. D524X, E562X, D583X, H594X, L603X, E607X, or D653X in the wild type M-MLV RT of SEQ ID NO: 81 or at a corresponding amino acid position in another wild type RT polypeptide sequence, wherein “X” can be any amino acid.

[0487] In various other embodiments, the prime editors utilized in the methods and compositions described herein (with RT provided as either a fusion partner or in trans) can include a variant RT comprising a P51X mutation in the wild type M-MLV RT of SEQ ID NO: 81 or at a corresponding amino acid position in another wild type RT polypeptide sequence, wherein “X” can be any amino acid. In certain embodiments, X is L.

[0488] In various other embodiments, the prime editors utilized in the methods and compositions described herein (with RT provided as either a fusion partner or in trans) can include a variant RT comprising a S67X mutation in the wild type M-MLV RT of SEQ ID NO: 81 or at a corresponding amino acid position in another wild type RT polypeptide sequence, wherein “X” can be any amino acid. In certain embodiments, X is K.

[0489] In various other embodiments, the prime editors utilized in the methods and compositions described herein (with RT provided as either a fusion partner or in trans) can include a variant RT comprising a E69X mutation in the wild type M-MLV RT of SEQ ID NO: 81 or at a corresponding amino acid position in another wild type RT polypeptide sequence, wherein “X” can be any amino acid. In certain embodiments, X is K.

[0490] In various other embodiments, the prime editors utilized in the methods and compositions described herein (with RT provided as either a fusion partner or in trans) can include a variant RT comprising a L139X mutation in the wild type M-MLV RT of SEQ ID NO: 81 or at a corresponding amino acid position in another wild type RT polypeptide sequence, wherein “X” can be any amino acid. In certain embodiments, X is P.

[0491] In various other embodiments, the prime editors utilized in the methods and compositions described herein (with RT provided as either a fusion partner or in trans) can include a variant RT comprising a T197X mutation in the wild type M-MLV RT of SEQ ID NO: 81 or at a corresponding amino acid position in another wild type RT polypeptide sequence, wherein “X” can be any amino acid. In certain embodiments, X is A.

[0492] In various other embodiments, the prime editors utilized in the methods and compositions described herein (with RT provided as either a fusion partner or in trans) can include a variant RT comprising a D200X mutation in the wild type M-MLV RT of SEQ ID NO: 81 or at a corresponding amino acid position in another wild type RT polypeptide sequence, wherein “X” can be any amino acid. In certain embodiments, X is N.

[0493] In various other embodiments, the prime editors utilized in the methods and compositions described herein (with RT provided as either a fusion partner or in trans) can include a variant RT comprising a H204X mutation in the wild type M-MLV RT of SEQ ID NO: 81 or at a corresponding amino acid position in another wild type RT polypeptide sequence, wherein “X” can be any amino acid. In certain embodiments, X is R.

[0494] In various other embodiments, the prime editors utilized in the methods and compositions described herein (with RT provided as either a fusion partner or in trans) can include a variant RT comprising a F209X mutation in the wild type M-MLV RT of SEQ ID NO: 81 or at a corresponding amino acid position in another wild type RT polypeptide sequence, wherein “X” can be any amino acid. In certain embodiments, X is N.

[0495] In various other embodiments, the prime editors utilized in the methods and compositions described herein (with RT provided as either a fusion partner or in trans) can include a variant RT comprising a E302X mutation in the wild type M-MLV RT of SEQ ID NO: 81 or at a corresponding amino acid position in another wild type RT polypeptide sequence, wherein “X” can be any amino acid. In certain embodiments, X is K.

[0496] In various other embodiments, the prime editors utilized in the methods and compositions described herein (with RT provided as either a fusion partner or in trans) can include a variant RT comprising a E302X mutation in the wild type M-MLV RT of SEQ ID NO: 81 or at a corresponding amino acid position in another wild type RT polypeptide sequence, wherein “X” can be any amino acid. In certain embodiments, X is R.

[0497] In various other embodiments, the prime editors utilized in the methods and compositions described herein (with RT provided as either a fusion partner or in trans) can include a variant RT comprising a T306X mutation in the wild type M-MLV RT of SEQ ID NO: 81 or at a corresponding amino acid position in another wild type RT polypeptide sequence, wherein “X” can be any amino acid. In certain embodiments, X is K.

[0498] In various other embodiments, the prime editors utilized in the methods and compositions described herein (with RT provided as either a fusion partner or in trans) can include a variant RT comprising a F309X mutation in the wild type M-MLV RT of SEQ ID NO: 81 or at a corresponding amino acid position in another wild type RT polypeptide sequence, wherein “X” can be any amino acid. In certain embodiments, X is N.

[0499] In various other embodiments, the prime editors utilized in the methods and compositions described herein (with RT provided as either a fusion partner or in trans) can include a variant RT comprising a W313X mutation in the wild type M-MLV RT of SEQ ID NO: 81 or at a corresponding amino acid position in another wild type RT polypeptide sequence, wherein “X” can be any amino acid. In certain embodiments, X is F.

[0500] In various other embodiments, the prime editors utilized in the methods and compositions described herein (with RT provided as either a fusion partner or in trans) can include a variant RT comprising a T330X mutation in the wild type M-MLV RT of SEQ ID NO: 81 or at a corresponding amino acid position in another wild type RT polypeptide sequence, wherein “X” can be any amino acid. In certain embodiments, X is P.

[0501] In various other embodiments, the prime editors utilized in the methods and compositions described herein (with RT provided as either a fusion partner or in trans) can include a variant RT comprising a L345X mutation in the wild type M-MLV RT of SEQ ID NO: 81 or at a corresponding amino acid position in another wild type RT polypeptide sequence, wherein “X” can be any amino acid. In certain embodiments, X is G.

[0502] In various other embodiments, the prime editors utilized in the methods and compositions described herein (with RT provided as either a fusion partner or in trans) can include a variant RT comprising a L435X mutation in the wild type M-MLV RT of SEQ ID NO: 81 or at a corresponding amino acid position in another wild type RT polypeptide sequence, wherein “X” can be any amino acid. In certain embodiments, X is G.

[0503] In various other embodiments, the prime editors utilized in the methods and compositions described herein (with RT provided as either a fusion partner or in trans) can include a variant RT comprising a N454X mutation in the wild type M-MLV RT of SEQ ID NO: 81 or at a corresponding amino acid position in another wild type RT polypeptide sequence, wherein “X” can be any amino acid. In certain embodiments, X is K.

[0504] In various other embodiments, the prime editors utilized in the methods and compositions described herein (with RT provided as either a fusion partner or in trans) can include a variant RT comprising a D524X mutation in the wild type M-MLV RT of SEQ ID NO: 81 or at a corresponding amino acid position in another wild type RT polypeptide sequence, wherein “X” can be any amino acid. In certain embodiments, X is G.

[0505] In various other embodiments, the prime editors utilized in the methods and compositions described herein (with RT provided as either a fusion partner or in trans) can include a variant RT comprising a E562X mutation in the wild type M-MLV RT of SEQ ID NO: 81 or at a corresponding amino acid position in another wild type RT polypeptide sequence, wherein “X” can be any amino acid. In certain embodiments, X is Q.

[0506] In various other embodiments, the prime editors utilized in the methods and compositions described herein (with RT provided as either a fusion partner or in trans) can include a variant RT comprising a D583X mutation in the wild type M-MLV RT of SEQ ID NO: 81 or at a corresponding amino acid position in another wild type RT polypeptide sequence, wherein “X” can be any amino acid. In certain embodiments, X is N.

[0507] In various other embodiments, the prime editors utilized in the methods and compositions described herein (with RT provided as either a fusion partner or in trans) can include a variant RT comprising a H594X mutation in the wild type M-MLV RT of SEQ ID NO: 81 or at a corresponding amino acid position in another wild type RT polypeptide sequence, wherein “X” can be any amino acid. In certain embodiments, X is Q.

[0508] In various other embodiments, the prime editors utilized in the methods and compositions described herein (with RT provided as either a fusion partner or in trans) can include a variant RT comprising a L603X mutation in the wild type M-MLV RT of SEQ ID NO: 81 or at a corresponding amino acid position in another wild type RT polypeptide sequence, wherein “X” can be any amino acid. In certain embodiments, X is W.

[0509] In various other embodiments, the prime editors utilized in the methods and compositions described herein (with RT provided as either a fusion partner or in trans) can include a variant RT comprising a E607X mutation in the wild type M-MLV RT of SEQ ID NO: 81 or at a corresponding amino acid position in another wild type RT polypeptide sequence, wherein “X” can be any amino acid. In certain embodiments, X is K.

[0510] In various other embodiments, the prime editors utilized in the methods and compositions described herein (with RT provided as either a fusion partner or in trans) can include a variant RT comprising a D653X mutation in the wild type M-MLV RT of SEQ ID NO: 81 or at a corresponding amino acid position in another wild type RT polypeptide sequence, wherein “X” can be any amino acid. In certain embodiments, X is N.

[0511] Some exemplary reverse transcriptases that can be fused to napDNAbp proteins or provided as individual proteins according to various embodiments of this disclosure are provided below. Exemplary reverse transcriptases include variants with at least 80%, at least 85%, at least 90%, at least 95% or at least 99% sequence identity to the wild-type enzymes or partial enzymes represented by SEQ ID NOs: 81-98.

[0512] The prime editor system utilized in the methods and compositions described here contemplates any publicly-available reverse transcriptase described or disclosed in any of the following U.S. patents (each of which are incorporated by reference in their entireties): U.S. Pat. Nos. 10,202,658; 10,189,831; 10,150,955; 9,932,567; 9,783,791; 9,580,698; 9,534,201; and 9,458,484, and any variant thereof that can be made using known methods for installing mutations, or known methods for evolving proteins. The following references describe reverse transcriptases in art. Each of their disclosures are incorporated herein by reference in their entireties.

[0513] Herzig, E., Voronin, N., Kucherenko, N. & Hizi, A. A Novel Leu92 Mutant of HIV-1 Reverse Transcriptase with a Selective Deficiency in Strand Transfer Causes a Loss of Viral Replication. J. Virol. 89, 8119-8129 (2015).

[0514] Mohr, G. et al. A Reverse Transcriptase-Cas1 Fusion Protein Contains a Cas6 Domain Required for Both CRISPR RNA Biogenesis and RNA Spacer Acquisition. Mol. Cell 72, 700-714.e8 (2018).

[0515] Zhao, C., Liu, F. & Pyle, A. M. An ultraprocessive, accurate reverse transcriptase encoded by a metazoan group II intron. RNA 24, 183-195 (2018).

[0516] Zimmerly, S. & Wu, L. An Unexplored Diversity of Reverse Transcriptases in Bacteria. Microbiol Spectr 3, MDNA3-0058-2014 (2015).

[0517] Ostertag. E. M. & Kazazian Jr, H. H. Biology of Mammalian L1 Retrotransposons. Annual Review of Genetics 35, 501-538 (2001).

[0518] Perach, M. & Hizi, A. Catalytic Features of the Recombinant Reverse Transcriptase of Bovine Leukemia Virus Expressed in Bacteria. Virology 259, 176-189 (1999).

[0519] Lim, D. et al. Crystal structure of the moloney murine leukemia virus RNase H domain. J. Virol. 80, 8379-8389 (2006).

[0520] Zhao, C. & Pyle, A. M. Crystal structures of a group II intron maturase reveal a missing link in spliceosome evolution. Nature Structural & Molecular Biology 23, 558-565 (2016). Griffiths, D. J. Endogenous retroviruses in the human genome sequence. Genome Biol. 2, REVIEWS1017 (2001).

[0521] Baranauskas, A. et al. Generation and characterization of new highly thermostable and processive M-MuLV reverse transcriptase variants. Protein Eng Des Sel 25, 657-668 (2012).

[0522] Zimmerly, S., Guo, H., Perlman, P. S. & Lambowltz, A. M. Group II intron mobility occurs by target DNA-primed reverse transcription. Cell82, 545-554 (1995).

[0523] Feng, Q., Moran, J. V., Kazazian, H. H. & Boeke. J. D. Human L1 retrotransposon encodes a conserved endonuclease required for retrotransposition. Cell 87, 905-916 (1996).

[0524] Berkhout, B., Jebbink. M. & Zsfros, J. Identification of an Active Reverse Transcriptase Enzyme Encoded by a Human Endogenous HERV-K Retrovirus. Journal of Virology 73, 2365-2375 (1999).

[0525] Kotewicz, M. L., Sampson. C. M., D'Alessio, J. M. & Gerard. G. F. Isolation of cloned Moloney murine leukemia virus reverse transcriptase lacking ribonuclease H activity. Nucleic Acids Res 16, 265-277 (1988).

[0526] Arezi, B. & Hogrefe, H. Novel mutations in Moloney Murine Leukemia Virus reverse transcriptase increase thermostability through tighter binding to template-primer. Nucleic Acids Res 37, 473-481 (2009).

[0527] Blain, S. W. & Goff, S. P. Nuclease activities of Moloney murine leukemia virus reverse transcriptase. Mutants with altered substrate specificities. J. Biol. Chem. 268, 23585-23592 (1993).

[0528] Xiong. Y. & Eickbush, T. H. Origin and evolution of retroelements based upon their reverse transcriptase sequences. EMBO J 9, 3353-3362 (1990). Herschhom, A. & Hizi. A. Retroviral reverse transcriptases. Cell. Mol. Life Sci. 67, 2717-2747 (2010).

[0529] Taube, R., Loya, S., Avidan, O., Perach, M. & Hizi, A. Reverse transcriptase of mouse mammary tumour virus: expression in bacteria, purification and biochemical characterization. Biochem. J. 329 (Pt 3), 579-587 (1998).

[0530] Liu, M. et al. Reverse Transcriptase-Mediated Tropism Switching in Bordetella Bacteriophage. Science 295, 2091-2094 (2002).

[0531] Luan. D. D., Korman, M. H., Jakubczak, J. L. & Eickbush. T. H. Reverse transcription of R2Bm RNA is primed by a nick at the chromosomal target site: a mechanism for non-LTR retrotransposition. Cell 72, 595-605 (1993).

[0532] Nottingham, R. M. et al. RNA-seq of human reference RNA samples using a thermostable group II intron reverse transcriptase. RNA 22, 597-613 (2016).

[0533] Telesnitsky, A. & Goff, S. P. RNase H domain mutations affect the interaction between Moloney murine leukemia virus reverse transcriptase and its primer-template. Proc. Natl. Acad. Sci. U.S.A. 90, 1276-1280 (1993).

[0534] Halvas, E. K., Svarovskaia, E. S. & Pathak, V. K. Role of Murine Leukemia Virus Reverse Transcriptase Deoxyribonucleoside Triphosphate-Binding Site in Retroviral Replication and In Vivo Fidelity. Journal of Virology 74, 10349-10358 (2000).

[0535] Nowak, E. et al. Structural analysis of monomeric retroviral reverse transcriptase in complex with an RNA/DNA hybrid. Nucleic Acids Res 41, 3874-3887 (2013).

[0536] Stamos, J. L., Lentzsch, A. M. & Lambowitz, A. M. Structure of a Thermostable Group II Intron Reverse Transcriptase with Template-Primer and Its Functional and Evolutionary Implications. Molecular Cell 68, 926-939.e4 (2017).

[0537] Das, D. & Georgiadis. M. M. The Crystal Structure of the Monomeric Reverse Transcriptase from Moloney Murine Leukemia Virus. Structure 12, 819-829 (2004).

[0538] Avidan, O., Meer, M. E., Oz, 1. & Hizi, A. The processivity and fidelity of DNA synthesis exhibited by the reverse transcriptase of bovine leukemia virus. European Journal of Biochemistry 269, 859-867 (2002).

[0539] Gerard, G. F. et al. The role of template-primer in protection of reverse transcriptase from thermal inactivation. Nucleic Acids Res 30, 3118-3129 (2002).

[0540] Monot, C. et al. The Specificity and Flexibility of L1 Reverse Transcription Priming at Imperfect T-Tracts. PLOS Genetics 9, e1003499 (2013).

[0541] Mohr, S. et al. Thermostable group II intron reverse transcriptase fusion proteins and their use in cDNA synthesis and next-generation RNA sequencing. RNA 19, 958-970 (2013).

[0542] Any of the references noted above which relate to reverse transcriptases are hereby incorporated by reference in their entireties, if not already stated so.

### Prime Editors: Fusion Proteins

[0543] The napDNAbps and the polymerases (e.g., reverse transcriptases) may be provided in the form of a fusion protein. That is, the present disclosure contemplates using prime editors comprising fusion proteins, wherein the fusion proteins comprise a napDNAbp domain and a polymerase (e.g., reverse transcriptase) domain.

[0544] The prime editor systems utilized in the methods and compositions described herein contemplate fusion proteins comprising a napDNAbp and a polymerase (e.g., DNA-dependent DNA polymerase or RNA-dependent DNA polymerase, such as, reverse transcriptase), and optionally joined by a linker. The application contemplates any suitable napDNAbp and polymerase (e.g., DNA-dependent DNA polymerase or RNA-dependent DNA polymerase, such as, reverse transcriptase) to be combined in a single fusion protein. Examples of napDNAbps and polymerases (e.g., DNA-dependent DNA polymerase or RNA-dependent DNA polymerase, such as, reverse transcriptase) are each defined herein. Since polymerases are well-known in the art, and the amino acid sequences are readily available, this disclosure is not meant in any way to be limited to those specific polymerases identified herein.

[0545] In various embodiments, the fusion proteins may comprise any suitable structural configuration. For example, the fusion protein may comprise from the N-terminus to the C-terminus direction, a napDNAbp fused to a polymerase (e.g., DNA-dependent DNA polymerase or RNA-dependent DNA polymerase, such as, reverse transcriptase). In other embodiments, the fusion protein may comprise from the N-terminus to the C-terminus direction, a polymerase (e.g., a reverse transcriptase) fused to a napDNAbp. The fused domain may optionally be joined by a linker, e.g., an amino acid sequence. In other embodiments, the fusion proteins may comprise the structure NH₂-[napDNAbp]-[polymerase]-COOH; or NH₂-[polymerase]-[napDNAbp]-C00H, wherein each instance of “]-[” indicates the presence of an optional linker sequence. In embodiments wherein the polymerase is a reverse transcriptase, the fusion proteins may comprise the structure NH-2-[napDNAbp]-[RT]-COOH; or NH₂-[RT]-[napDNAbp]-COOH, wherein each instance of “]-[” indicates the presence of an optional linker sequence.

[0546] In various embodiments, the prime editor fusion protein may have the following amino acid sequence (referred to herein as “PE1”), which includes a Cas9 variant comprising an H840A mutation (i.e., a Cas9 nickase) and an M-MLV RT wild type, as well as an N-terminal NLS sequence (19 amino acids) and an amino acid linker (32 amino acids) that joins the C-terminus of the Cas9 nickase domain to the N-terminus of the RT domain. The PE1 fusion protein has the following structure: [NLS]-[Cas9(H840A)]-[linker]-[MMLV_RT(wt)]. The amino acid sequence of PE1 and its individual components are as follows:

| Description | Sequence |
|---|---|
| PEI FUSION | MKRTADGSEFESPKKKRKVDKKYSIGLDIG |
| PROTEIN | TNSVGWAVITDEYKVPSKKFKVLGNTDRHS |
| CAS9(H840A)- | IKKNLIGALLFDSGETAEATRLKRTARRRY |
| MMLV_RT(WT) | TRRKNRICYLQEIFSNEMAKVDDSFFHRLE |
| | ESELVEEDKKHERHPIFGNIVDEVAYHEKY |
| | PTIYHLRKKLVDSTDKADLRLIYLALAHMI |
| | KFRGHFLIEGDLNPDNSDVDKLFIQLVQTY |
| | NQLFEENPINASGVDAKAILSARLSKSRRL |
| | ENLIAQLPGEKKNGLFGNLIALSLGLTPNF |
| | KSNEDLAEDAKLQLSKDTYDDDLDNLLAQI |
| | GDQYADLFLAAKNLSDAILLSDILRVNTEI |
| | TKAPLSASMIKRYDEHHQDLTLLKALVRQQ |
| | LPEKYKEIFFDQSKNGYAGYIDGGASQEEF |
| | YKFIKPILEKMDGTEELLVKLNREDLLRKQ |
| | RTEDNGSIPHQIHLGELHAILRRQEDFYPF |
| | LKDNREKIEKILTFRIPYYVGPLARGNSRF |
| | AWMTRKSEETITPWNFEEVVDKGASAQSFI |
| | ERMTNFDKNLPNEKVLPKHSLLYEYFTVYN |
| | ELTKVKYVTEGMRKPAFLSGEQKKAIVDLL |
| | FKTNRKVTVKQLKEDYFKKIECFDSVEISG |
| | VEDRFNASLGTYHDLLKIIKDKDFLDNEEN |
| | EDILEDIVLTLTLFEDREMIEERLKTYAHL |
| | EDDKVMKQLKRRRYTGWGRLSRKLINGIRD |
| | KQSGKTILDELKSDGFANRNFMQLIHDDSL |
| | TFKEDIQKAQVSGQGDSLHEHIANLAGSPA |
| | IKKGILQTVKVVDELVKVMGRHKPENIVIE |
| | MARENQTTQKGQKNSRERMKRIEEGIKELG |
| | SQILKEHPVENTQLQNEKLYLYYLQNGRDM |
| | YVDQELDINRLSDYDVDAIVPQSFLKDDSI |
| | DNKVLTRSDKNRGKSDNVPSEEVVKKMKNY |
| | WRQLLNAKLITQRKFDNLTKAERGGLSELD |
| | KAGFIKRQLVETRQITKHVAQILDSRMNTK |
| | YDENDKLIREVKVITLKSKLVSDERKDFQF |
| | YKVREINNYHHAHDAYLNAVVGTALIKKYP |
| | KLESEFVYGDYKVYDVRKMIAKSEQEIGKA |
| | TAKYFFYSNIMNFFKTEITLANGEIRKRPL |
| | IETNGETGEIVWDKGRDFATVRKVLSMPQV |
| | NIVKKTEVQTGGFSKESILPKRNSDKLIAR |
| | KKDWDPKKYGGFDSPTVAYSVLVVAKVEKG |
| | KSKKLKSVKELLGITIMERSSFEKNPIDFL |
| | EAKGYKEVKKDLIIKLPKYSLFELENGRKR |
| | MLASAGELQKGNELALPSKYVNFLYLASHY |
| | EKLKGSPEDNEQKQLFVEQHKHYLDEIIEQ |
| | ISEFSKRVILADANLDKVLSAYNKHRDKPI |
| | REQAENIIHLFTLTNLGAPAAFKYFDTTID |
| | RKRYTSTKEVLDATLIHQSITGLYETRIDL |
| | SQLGGDSGGSSGGSSGSETPGTSESATPES |
| | SGGSSGGSSTLNIEDEYRLHETSKEPDVSL |
| | GSTWLSDFPQAWAETGGMGLAVRQAPLIIP |
| | LKATSTPVSIKQYPMSQEARLGIKPHIQRL |
| | LDQGILVPCQSPWNTPLLPVKKPGTNDYRP |
| | VQDLREVNKRVEDIHPTVPNPYNLLSGLPP |
| | SHQWYTVLDLKDAFFCLRLHPTSQPLFAFE |
| | WRDPEMGISGQLTWTRLPQGFKNSPTLFDE |
| | ALHRDLADFRIQHPDLILLQYVDDLLLAAT |
| | SELDCQQGTRALLQTLGNLGYRASAKKAQI |
| | CQKQVKYLGYLLKEGQRWLTEARKETVMGQ |
| | PTPKTPRQLREFLGTAGFCRLWIPGFAEMA |
| | APLYPLTKTGTLFNWGPDQQKAYQEIKQAL |
| | LTAPALGLPDLTKPFELFVDEKQGYAKGVL |
| | TQKLGPWRRPVAYLSKKLDPVAAGWPPCLR |
| | MVAAIAVLTKDAGKLIMGQPLVILAPHAVE |
| | ALVKQPPDRWLSNARMTHYQALLLDTDRVQ |
| | FGPVVALNPATLLPLPEEGLQHNCLDILAE |
| | AHGTRPDLTDQPLPDADHTWYTDGSSLLQE |
| | GQRKAGAAVTTETEVIWAKALPAGTSAQRA |
| | ELIALTQALKMAEGKKLNVYTDSRYAFATA |
| | HIHGEIYRRRGLLTSEGKEIKNKDEILALL |
| | KALFLPKRLSIIHCPGHQKGHSAEARGNRM |
| | ADQAARKAAITETPDTSTLLIENSSPSGGS |
| | KRTADGSEFEPKKKRKV |
| | (SEQ ID NO: 100) |
| | KEY: |
| | NUCLEAR LOCALIZATION SEQUENCE (NLS) TOP: |
| | (SEQ ID NO: 101), |
| | BOTTOM: (SEQ ID NO: 103) |
| | CAS9(H840A) (SEQ ID NO: 37) |
| | 33-AMINO ACID LINKER (SEQ ID NO: 102) |
| | M-MLV reverse transcriptase (SEQ ID NO: 81) |
| PE1-N-TERMINAL | MKRTADGSEFESPKKKRKV (SEQ ID NO: 101) |
| NLS | |
| PEI-CAS9 (H840A) | DKKYSIGLDIGTNSVGWAVITDEYKVPSKK |
| (MET MINUS) | FKVLGNTDRHSIKKNLIGALLFDSGETAEA |
| | TRLKRTARRRYTRRKNRICYLQEIFSNEMA |
| | KVDDSFFHRLEESFLVEEDKKHERHPIFGN |
| | IVDEVAYHEKYPTIYHLRKKLVDSTDKADL |
| | RLIYLALAHMIKFRGHFLIEGDLNPDNSDV |
| | DKLFIQLVQTYNQLFEENPINASGVDAKAI |
| | LSARLSKSRRLENLIAQLPGEKKNGLFGNL |
| | IALSLGLTPNFKSNFDLAEDAKLQLSKDTY |
| | DDDLDNLLAQIGDQYADLFLAAKNLSDAIL |
| | LSDILRVNTEITKAPLSASMIKRYDEHHQD |
| | LTLLKALVRQQLPEKYKEIFFDQSKNGYAG |
| | YIDGGASQEEFYKFIKPILEKMDQTEELLV |
| | KLNREDLLRKQRTFDNGSIPHQIHLGELHA |
| | ILRRQEDFYPFLKDNREKIEKILTFRIPYY |
| | VGPLARGNSRFAWMTRKSEETITPWNFEEV |
| | VDKGASAQSFIERMTNFDKNLPNEKVLPKH |
| | SLLYEYFTVYNELTKVKYVTEGMRKPAFLS |
| | GEQKKAIVDLLFKTNRKVTVKQLKEDYFKK |
| | IECFDSVEISGVEDRENASLGTYHDLLKII |
| | KDKDELDNEENEDILEDIVLTLTLFEDREM |
| | IEERLKTYAHLEDDKVMKQLKRRRYTGWGR |
| | LSRKLINGIRDKQSGKTILDFLKSDGFANR |
| | NFMQLIHDDSLTFKEDIQKAQVSGQGDSLH |
| | EHIANLAGSPAIKKGILQTVKVVDELVKVM |
| | GRHKPENIVIEMARENQTTQKGQKNSRERM |
| | KRIEEGIKELGSQILKEHPVENTQLQNEKL |
| | YLYYLQNGRDMYVDQELDINRLSDYDVDAI |
| | VPQSFLKDDSIDNKVLTRSDKNRGKSDNVP |
| | SEEVVKKMKNYWRQLLNAKLITQRKEDNLT |
| | KAERGGLSELDKAGFIKRQLVETRQITKHV |
| | AQILDSRMNTKYDENDKLIREVKVITLKSK |
| | LVSDFRKDFQFYKVREINNYHHAHDAYLNA |
| | VVGTALIKKYPKLESEFVYGDYKVYDVRKM |
| | IAKSEQEIGKATAKYFFYSNIMNFFKTEIT |
| | LANGEIRKRPLIETNGETGEIVWDKGRDFA |
| | TVRKVLSMPQVNIVKKTEVQTGGFSKESIL |
| | PKRNSDKLIARKKDWDPKKYGGFDSPTVAY |
| | SVLVVAKVEKGKSKKLKSVKELLGITIMER |
| | SSFEKNPIDFLEAKGYKEVKKDLUIKLPKY |
| | SLFELENGRKRMLASAGELQKGNELALPSK |
| | YVNFLYLASHYEKLKGSPEDNEQKQLFVEQ |
| | HKHYLDEIIEQISEFSKRVILADANLDKVL |
| | SAYNKHRDKPIREQAENIIHLFTLTNLGAP |
| | AAFKYFDTTIDRKRYTSTKEVLDATLIHQS |
| | ITGLYETRIDLSQLGGD |
| | (SEQ ID NO: 37) |
| PEI-LINKER | SGGSSGGSSGSETPGTSESATPESSGGSSG |
| BETWEEN CAS9 | GSS (SEQ ID NO: 102) |
| DOMAIN AND RT | |
| DOMAIN (33 AMINO | |
| ACIDS) | |
| PE1-M-MLV RT | TLNIEDEYRLHETSKEPDVSLGSTWLSDFP |
| | QAWAETGGMGLAVRQAPLIIPLKATSTPVS |
| | IKQYPMSQEARLGIKPHIQRLLDQGILVPC |
| | QSPWNTPLLPVKKPGTNDYRPVQDLREVNK |
| | RVEDIHPTVPNPYNLLSGLPPSHQWYTVLD |
| | LKDAFFCLRLHPTSQPLFAFEWRDPEMGIS |
| | GQLTWTRLPQGFKNSPTLFDEALHRDLADF |
| | RIQHPDLILLQYVDDLLLAATSELDCQQGT |
| | RALLQTLGNLGYRASAKKAQICQKQVKYLG |
| | YLLKEGQRWLTEARKETVMGQPTPKTPRQL |
| | REFLGTAGFCRLWIPGFAEMAAPLYPLTKT |
| | GTLFNWGPDQQKAYQEIKQALLTAPALGLP |
| | DLTKPFELFVDEKQGYAKGVLTQKLGPWRR |
| | PVAYLSKKLDPVAAGWPPCLRMVAAIAVLT |
| | KDAGKLTMGQPLVILAPHAVEALVKQPPDR |
| | WLSNARMTHYQALLLDTDRVQFGPVVALNP |
| | ATLLPLPEEGLQHNCLDILAEAHGTRPDLT |
| | DQPLPDADHTWYTDGSSLLQEGQRKAGAAV |
| | TTETEVIWAKALPAGTSAQRAELIALTQAL |
| | KMAEGKKLNVYTDSRYAFATAHIHGEIYRR |
| | RGLLTSEGKEIKNKDEILALLKALFLPKRL |
| | SIIHCPGHQKGHSAEARGNRMADQAARKAA |
| | ITETPDTSTLLIENSSP |
| | (SEQ ID NO: 81) |
| PEI-C-TERMINAL NLS | SGGSKRTADGSEFEPKKKRKV |
| | (SEQ ID NO: 103) |

[0547] In another embodiment, the prime editor fusion protein may have the following amino acid sequence (referred to herein as “PE2”), which includes a Cas9 variant comprising an H840A mutation (i.e., a Cas9 nickase) and an M-MLV RT comprising mutations D200N, T330P, L603W, T306K, and W313F, as well as an N-terminal NLS sequence (19 amino acids) and an amino acid linker (33 amino acids) that joins the C-terminus of the Cas9 nickase domain to the N-terminus of the RT domain. The PE2 fusion protein has the following structure: [NLS]-[Cas9(H840A)]-[linker]-[MMLV_RT(D200N)(T330P)(L603W)(T306K)(W3I3F)]. The amino acid sequence of PE2 is as follows:

| | |
|---|---|
| PE2 FUSION PROTEIN | MKRTADGSEFESPKKKRKVDKKYSIGLDIGTNSVGWAVITDEYKV |
| CAS9(H840A)-MMLV_RT | PSKKFKVLGNTDRHSIKKNLIGALLFDSGETAEATRLKRTARRRY |
| D200N | TRRKNRICYLQEIFSNEMAKVDDSFFHRLEESFLVEEDKKHERHP |
| T330P | IFGNIVDEVAYHEKYPTIYHLRKKLVDSTDKADLRLIYLALAHMI |
| L603W | KERGHFLIEGDLNPDNSDVDKLFIQLVQTYNQLFEENPINASGVD |
| T306K | AKAILSARLSKSRRLENLIAQLPGEKKNGLFGNLIALSLGLTPNF |
| W313F | KSNFDLAEDAKLQLSKDTYDDDLDNLLAQIGDQYADLFLAAKNLS |
| | DAILLSDILRVNTEITKAPLSASMIKRYDEHHQDLTLLKALVRQQ |
| | LPEKYKEIFFDQSKNGYAGYIDGGASQEEFYKFIKPILEKMDGTE |
| | ELLVKLNREDLLRKQRTFDNGSIPHQIHLGELHAILRRQEDFYPF |
| | LKDNREKIEKILTFRIPYYVGPLARGNSRFAWMTRKSEETITPWN |
| | FEEVVDKGASAQSFIERMTNEDKNLPNEKVLPKHSLLYEYFTVYN |
| | ELTKVKYVTEGMRKPAFLSGEQKKAIVDLLFKTNRKVTVKQLKED |
| | YFKKIECFDSVEISGVEDRFNASLGTYRDLLKIIKDKDELDNEEN |
| | EDILEDIVLTLTLFEDREMIEERLKTYAHLFDDKVMKQLKRRRYT |
| | GWGRLSRKLINGIRDKQSGKTILDFLKSDGFANRNFMQLIHDDSL |
| | TFKEDIQKAQVSGQGDSLHEHIANLAGSPAIKKGILQTVKVVDEL |
| | VKVMGRHKPENIVIEMARENQTTQKGQKNSRERMKRIEEGIKELG |
| | SQILKEHPVENTQLQNEKLYLYYLQNGRDMYVDQELDINRLSDYD |
| | VDAIVPQSFLKDDSIDNKVLTRSDKNRGKSDNVPSEEVVKKMKNY |
| | WRQLLNAKLITQRKFDNLTKAERGGLSELDKAGFIKRQLVETRQI |
| | TKHVAQILDSRMNTKYDENDKLIREVKVITLKSKLVSDERKDFQF |
| | YKVREINNYHHAHDAYLNAVVGTALIKKYPKLESEFVYGDYKVYD |
| | VRKMIAKSEQEIGKATAKYFFYSNIMNFFKTEITLANGEIRKRPL |
| | IETNGETGEIVWDKGRDFATVRKVLSMPQVNIVKKTEVQTGGFSK |
| | ESILPKRNSDKLIARKKDWDPKKYGGFDSPTVAYSVLVVAKVEKG |
| | KSKKLKSVKELLGITIMERSSFEKNPIDFLEAKGYKEVKKDLIIK |
| | LPKYSLFELENGRKRMLASAGELQKGNELALPSKYVNFLYLASHY |
| | EKLKGSPEDNEQKQLFVEQHKHYLDEIIEQISEFSKRVILADANL |
| | DKVLSAYNKHRDKPIREQAENIIHLFTLINLGAPAAFKYEDTTID |
| | RKRYTSTKEVLDATLIHQSITGLVETRIDLSQLGGDSGGSSGGSS |
| | GSETPGTSESATPESSGGSSGGSSTLNIEDEYRLHETSKEPDVSL |
| | GSTWLSDFPQAWAETGGMGLAVRQAPLIIPLKATSTPVSIKQYPM |
| | SQEARLGIKPHIQRLLDQGILVPCQSPWNTPLLPVKKPGTNDYRP |
| | VQDLREVNKRVEDIHPTVPNPYNLLSGLPPSHQWYTVLDLKDAFF |
| | CLRLHPTSQPLFAFEWRDPEMGISGQLTWTRLPQGFKNSPTLFNE |
| | ALHRDLADFRIQHPDLILLQYVDDLLLAATSELDCQQGTRALLQT |
| | LGNLGYRASAKKAQICQKQVKYLGYLLKEGQRWLTEARKETVMGQ |
| | PTPKTPRQLREFLGKAGFCRLFIPGFAEMAAPLYPLTKPGTLFNW |
| | GPDQQKAYQEIKQALLTAPALGLPDLTKPFELFVDEKQGYAKGVL |
| | TQKLGPWRRPVAYLSKKLDPVAAGWPPCLRMVAAIAVLTKDAGKL |
| | TMGQPLVILAPHAVEALVKQPPDRWLSNARMTHYQALLLDTDRVQ |
| | FGPVVALNPATLLPLPEEGLQHNCLDILAEAHGTRPDLTDQPLPD |
| | ADHTWYTDGSSLLQEGQRKAGAAVTTETEVIWAKALPAGTSAQRA |
| | ELIALTQALKMAEGKKLNVYTDSRYAFATAHIHGEIYRRRGWLTS |
| | EGKEIKNKDEILALLKALFLPKRLSIIHCPGHQKGHSAEARGNRM |
| | ADQAARKAAITETPDTSTLLIENSSPSGGSKRTADGSEFEPKKKR |
| | KV |
| | (SEQ ID NO: 107) |
| | KEY: |
| | NUCLEAR LOCALIZATION SEQUENCE (NLS) TOP: (SEQ |
| | ID NO: 101), |
| | BOTTOM: (SEQ ID NO: 103) |
| | CAS9(H840A) (SEQ ID NO: 37) |
| | 33-AMINO ACID LINKER (SEQ ID NO: 102) |
| | M-MLV reverse transcriptase (SEQ ID NO: 98) |
| PE2-N-TERMINAL NLS | DKKYSIGLDIGTNSVGWAVITDEYKVPSKKFKVLGNTDRHSIKKN |
| | LIGALLFDMKRTADGSEFESPKKKRKV |
| | (SEQ ID NO: 101) |
| PE2-CAS9 (H840A) | SGETAEATRLKRTARRRYTRRKNRICYLQEIFSNEMAKVDDSFFH |
| (MET MINUS) | RLEESFLVEEDKKHERHPIFGNIVDEVAYHEKYPTIYHLRKKLVD |
| | STDKADLRLIYLALAHMIKFRGHFLIEGDLNPDNSDVDKLFIQLV |
| | QTYNQLFEENPINASGVDAKAILSARLSKSRRLENLIAQLPGEKK |
| | NGLFGNLIALSLGLTPNFKSNFDLAEDAKLQLSKDTYDDDLDNLL |
| | AQIGDQYADLFLAAKNLSDAILLSDILRVNTEITKAPLSASMIKR |
| | YDEHHQDLTLLKALVRQQLPEKYKEIFFDQSKNGYAGYIDGGASQ |
| | EEFYKFIKPILEKMDGTEELLVKLNREDLLRKQRTFDNGSIPHQI |
| | HLGELHAILRRQEDFYPFLKDNREKIEKILTFRIPYYVGPLARGN |
| | SRFAWMTRKSEETITPWNFEEVVDKGASAQSFIERMTNFDKNLPN |
| | EKVLPKHSLLYEYFTVYNELTKVKYVTEGMRKPAFLSGEQKKAIV |
| | DLLFKTNRKVTVKQLKEDYFKKIECFDSVEISGVEDRFNASLGTY |
| | HDLLKIIKDKDFLDNEENEDILEDIVLTLTLFEDREMIEERLKTY |
| | AHLFDDKVMKQLKRRRYTGWGRLSRKLINGIRDKQSGKTILDFLK |
| | SDGFANRNFMQLIHDDSLTFKEDIQKAQVSGQGDSLHEHIANLAG |
| | SPAIKKGILQTVKVVDELVKVMGRHKPENIVIEMARENQTTQKGQ |
| | KNSRERMKRIEEGIKELGSQILKEHPVENTQLQNEKLYLYYLQNG |
| | RDMYVDQELDINRLSDYDVDAIVPQSFLKDDSIDNKVLTRSDKNR |
| | GKSDNVPSEEVVKKMKNYWRQLLNAKLITQRKFDNLTKAERGGLS |
| | ELDKAGFIKRQLVETRQITKHVAQILDSRMNTKYDENDKLIREVK |
| | VITLKSKLVSDFRKDFQFYKVREINNYHHAHDAYLNAVVGTALIK |
| | KYPKLESEFVYGDYKVYDVRKMIAKSEQEIGKATAKYFFYSNIMN |
| | FFKTEITLANGEIRKRPLIETNGETGEIVWDKGRDFATVRKVLSM |
| | PQVNIVKKTEVQTGGFSKESILPKRNSDKLIARKKDWDPKKYGGF |
| | DSPTVAYSVLVVAKVEKGKSKKLKSVKELLGITIMERSSFEKNPI |
| | DFLEAKGYKEVKKDLIIKLPKYSLFELENGRKRMLASAGELQKGN |
| | ELALPSKYVNFLYLASHYEKLKGSPEDNEQKQLFVEQHKHYLDEI |
| | IEQISEFSKRVILADANLDKVLSAYNKHRDKPIREQAENIIHLFT |
| | LTNLGAPAAFKYFDTTIDRKRYTSTKEVLDATLIHQSITGLYETR |
| | IDLSQLGGD |
| | (SEQ ID NO: 37) |
| PE2-LINKER BETWEEN | SGGSSGGSSGSETPGTSESATPESSGGSSGGSS |
| CAS9 DOMAIN AND RT | (SEQ ID NO: 102) |
| DOMAIN (33 AMINO | |
| ACIDS) | |
| PE2-MMLV_RT | TLNIEDEYRLHETSKEPDVSLGSTWLSDFPQAWAETGGMGLAVRQ |
| D200N | APLIIPLKATSTPVSIKQYPMSQEARLGIKPHIQRLLDQGILVPC |
| T330P | QSPWNTPLLPVKKPGTNDYRPVQDLREVNKRVEDIHPTVPNPYNL |
| L603W | LSGLPPSHQWYTVLDLKDAFFCLRLHPTSQPLFAFEWRDPEMGIS |
| T306K | GQLTWTRLPQGFKNSPTLFNEALHRDLADFRIQHPDLILLQYVDD |
| W313F | LLLAATSELDCQQGTRALLQTLQNLGYRASAKKAQICQKQVKYLQ |
| | YLLKEGQRWLTEARKETVMGQPTPKTPRQLREFLGKAGFCRLFIP |
| | GFAEMAAPLYPLTKPGTLFNWGPDQQKAYQEIKQALLTAPALGLP |
| | DLTKPFELFVDEKQGYAKGVLTQKLGPWRRPVAYLSKKLDPVAAG |
| | WPPCLRMVAAIAVLTKDAGKLTMGQPLVILAPHAVEALVKQPPDR |
| | WLSNARMTHYQALLLDTDRVQFGPVVALNPATLLPLPEEGLQHNC |
| | LDILAEAHGTRPDLTDQPLPDADHTWYTDGSSLLQEGQRKAGAAV |
| | TTETEVIWAKALPAGTSAQRAELIALTQALKMAEGKKLNVYTDSR |
| | YAFATAHIHGETYRRRGWLTSEGKEIKNKDEILALLKALFLPKRL |
| | SIIHCPGHQKGHSAEARGNRMADQAARKAAITETPDTSTLLIENS |
| | SP |
| | (SEQ ID NO: 98) |
| PE2-C-TERMINAL NLS | SGGSKRTADGSEFEPKKKRKV (SEQ ID NO: 103) |

[0548] In still other embodiments, the prime editor fusion protein may have the following amino acid sequences:

| | |
|---|---|
| PE FUSION PROTEIN | MKRTADGSEFESPKKKRKVTLNIEDEYRLHETSKEPDVSLGSTWL |
| MMLV_RT(WT)- | SDFPQAWAETGGMGLAVRQAPLIIPLKATSTPVSIKQYPMSQEAR |
| 32AA-CAS9(H840A) | LGIKPHIQRLLDQGILVPCQSPWNTPLLPVKKPGTNDYRPVQDLR |
| | EVNKRVEDIHPTVPNPYNLLSGLPPSHQWYTVLDLKDAFFCLRLH |
| | PTSQPLFAFEWRDPEMGISGQLTWTRLPQGFKNSPTLFDEALHRD |
| | LADFRIQHPDLILLQYVDDLLLAATSELDCQQGTRALLQTLGNLG |
| | YRASAKKAQICQKQVKYLGYLLKEGQRWLTEARKETVMGQPTPKT |
| | PRQLREFLGTAGFCRLWIPGFAEMAAPLYPLTKTGTLFNWGPDQQ |
| | KAYQEIKQALLTAPALGLPDLTKPFELFVDEKQGYAKGVLTQKLG |
| | PWRRPVAYLSKKLDPVAAGWPPCLRMVAAIAVLTKDAGKLTMGQP |
| | LVILAPHAVEALVKQPPDRWLSNARMTHYQALLLDTDRVQFGPVV |
| | ALNPATLLPLPEEGLQHNCLDILAEAHGTRPDLTDQPLPDADHTW |
| | YTDGSSLLQEGQRKAGAAVTTETEVIWAKALPAGTSAQRAELIAL |
| | TQALKMAEGKKLNVYTDSRYAFATAHIHGEIYRRRGLLTSEGKEI |
| | KNKDEILALLKALFLPKRLSIIHCPGHQKGHSAEARGNRMADQAA |
| | RKAAITETPDTSTLLIENSSPSGGSSGGSSGSETPGTSESATPES |
| | SGGSSGGSSDKKYSIGLDIGTNSVGWAVITDEYKVPSKKFKVLGN |
| | TDRHSIKKNLIGALLEDSGETAEATRLKRTARRRYTRRKNRICYL |
| | QEIFSNEMAKVDDSFFHRLEESFLVEEDKKHERHPIFGNIVDEVA |
| | YHEKYPTIYHLRKKLVDSTDKADLRLIYLALAHMIKFRGHFLIEG |
| | DLNPDNSDVDKLFIQLVQTYNQLFEENPINASGVDAKAILSARLS |
| | KSRRLENLIAQLPGEKKNGLFGNLIALSLGLTPNFKSNFDLAEDA |
| | KLQLSKDTYDDDLDNLLAQIGDQYADLFLAAKNLSDAILLSDILR |
| | VNTEITKAPLSASMIKRYDEHHQDLTLLKALVRQQLPEKYKEIFF |
| | DQSKNGYAGYIDGGASQEEFYKFIKPILEKMDGTEELLVKLNRED |
| | LLRKQRTFDNGSIPHQIHLGELHAILRRQEDFYPFLKDNREKIEK |
| | ILTFRIPYYVGPLARGNSRFAWMTRKSEETITPWNFEEVVDKGAS |
| | AQSFIERMTNEDKNLPNEKVLPKHISLLYEYFTVYNELTKVKYVT |
| | EGMRKPAFLSGEQKKAIVDLLFKTNRKVTVKQLKEDYFKKIECFD |
| | SVEISGVEDRFNASLGTYHDLLKIIKDKDFLDNEENEDILEDIVL |
| | TLTLFEDREMIEERLKTYAHLEDDKVMKQLKRRRYTGWGRLSRKL |
| | INGIRDKQSGKTILDFLKSDGFANRNEMQLIHDDSLTFKEDIQKA |
| | QVSGQGDSLHEHIANLAGSPAIKKGILQTVKVVDELVKVMGRHKP |
| | ENIVIEMARENQTTQKGQKNSRERMKRIEEGIKELGSQILKEHPV |
| | ENTQLQNEKLYLYYLQNGRDMYVDQELDINRLSDYDVDAIVPQSF |
| | LKDDSIDNKVLTRSDKNRGKSDNVPSEEVVKKMKNYWRQLLNAKL |
| | ITQRKFDNLTKAERGGLSELDKAGFIKRQLVETRQITKHVAQILD |
| | SRMNTKYDENDKLIREVKVITLKSKLVSDFRKDFQFYKVREINNY |
| | HHAHDAYLNAVVGTALIKKYPKLESEFVYGDYKVYDVRKMIAKSE |
| | QEIGKATAKYFFYSNIMNFFKTEITLANGEIRKRPLIETNGETGE |
| | IVWDKGRDFATVRKVLSMPQVNIVKKTEVQTGGFSKESILPKRNS |
| | DKLIARKKDWDPKKYGGFDSPTVAYSVLVVAKVEKGKSKKLKSVK |
| | ELLGITIMERSSFEKNPIDFLEAKGYKEVKKDLIIKLPKYSLFEL |
| | ENGRKRMLASAGELQKGNELALPSKYVNFLYLASHYEKLKGSPED |
| | NEQKQLFVEQHKHYLDEHIEQISEFSKRVILADANLDKVLSAYNK |
| | HRDKPIREQAENIIHLFTLINLGAPAAFKYFDTTIDRKRYTSTKE |
| | VLDATLIHQSITGLYETRIDLSQLGGDSGGSKRTADGSEFEPKKK |
| | RKV |
| | (SEQ ID NO: 108) |
| | KEY: |
| | NUCLEAR LOCALIZATION SEQUENCE (NLS) TOP:(SEQ |
| | ID NO: 101), |
| | BOTTOM: (SEQ ID NO: 103) |
| | CAS9(H840A) (SEQ ID NO: 37) |
| | 33-AMINO ACID LINKER (SEQ ID NO: 102) |
| | M-MLV reverse transcriptase (SEQ ID NO: 81) |
| PE FUSION PROTEIN | MKRTADGSEFESPKKKRKVTLNIEDEYRLHETSKEPDVSLGSTWL |
| MMLV_RT(WT)- | SDFPQAWAETGGMGLAVRQAPLIIPLKATSTPVSIKQYPMSQEAR |
| 60AA-CAS9(H840A) | LGIKPHIQRLLDQGILVPCQSPWNTPLLPVKKPGTNDYRPVQDLR |
| | EVNKRVEDIHPTVPNPYNLLSGLPPSHQWYTVLDLKDAFFCLRLH |
| | PTSQPLFAFEWRDPEMGISGQLTWTRLPQGFKNSPTLFDEALHRD |
| | LADFRIQHPDLILLQYVDDLLLAATSELDCQQGTRALLQTLGNLG |
| | YRASAKKAQICQKQVKYLGYLLKEGQRWLTEARKETVMGQPTPKT |
| | PRQLREFLGTAGFCRLWIPGFAEMAAPLYPLTKTGTLFNWGPDQQ |
| | KAYQEIKQALLTAPALGLPDLTKPFELFVDEKQGYAKGVLTQKLG |
| | PWRRPVAYLSKKLDPVAAGWPPCLRMVAAIAVLTKDAGKLTMGQP |
| | LVILAPHAVEALVKQPPDRWLSNARMTHYQALLLDTDRVQFGPVV |
| | ALNPATLLPLPEEGLQHNCLDILAEAHGTRPDLTDQPLPDADHTW |
| | YTDGSSLLQEGQRKAGAAVTTETEVIWAKALPAGTSAQRAELIAL |
| | TQALKMAEGKKLNVYTDSRYAFATAHIHGEIYRRRGLLTSEGKEI |
| | KNKDEILALLKALFLPKRLSIIHCPGHQKGHSAEARGNRMADQAA |
| | RKAAITETPDTSTLLIENSSPSGGSSGGSSGSETPGTSESATPES |
| | AGSYPYDVPDYAGSAAPAAKKKKLDGSGSGGSSGGSDKKYSIGLD |
| | IGTNSVGWAVITDEYKVPSKKFKVLGNTDRHSIKKNLIGALLFDS |
| | GETAEATRLKRTARRRYTRRKNRICYLQEIFSNEMAKVDDSFFHR |
| | LEESFLVEEDKKHERHPIFGNIVDEVAYHEKYPTIYHLRKKLVDS |
| | TDKADLRLIYLALAHMIKFRGHFLIEGDLNPDNSDVDKLFIQLVQ |
| | TYNQLFEENPINASGVDAKAILSARLSKSRRLENLIAQLPGEKKN |
| | GLFGNLIALSLGLTPNFKSNFDLAEDAKLQLSKDTYDDDLDNLLA |
| | QIGDQYADLFLAAKNLSDAILLSDILRVNTEITKAPLSASMIKRY |
| | DEHHQDLTLLKALVRQQLPEKYKEIFFDQSKNGYAGYIDGGASQE |
| | EFYKFIKPILEKMDGTEELLVKLNREDLLRKQRTFDNGSIPHQIH |
| | LGELHAILRRQEDFYPFLKDNREKIEKILTFRIPYYVGPLARGNS |
| | RFAWMTRKSEETITPWNFEEVVDKGASAQSFIERMTNFDKNLPNE |
| | KVLPKHSLLYEYFTVYNELTKVKYVTEGMRKPAFLSGEQKKAIVD |
| | LLFKTNRKVTVKQLKEDYFKKIECFDSVEISGVEDRFNASLGTYH |
| | DLLKIIKDKDFLDNEENEDILEDIVLTLTLFEDREMIEERLKTYA |
| | HLEDDKVMKQLKRRRYTGWGRLSRKLINGIRDKQSGKTILDFLKS |
| | DGFANRNFMQLIHDDSLTFKEDIQKAQVSGQGDSLHEHIANLAGS |
| | PAIKKGILQTVKVVDELVKVMGRHIKPENIVIEMARENQTTQKGQ |
| | KNSRERMKRIEEGIKELGSQILKEHPVENTQLQNEKLYLYYLQNG |
| | RDMYVDQELDINRLSDYDVDAIVPQSFLKDDSIDNKVLTRSDKNR |
| | GKSDNVPSEEVVKKMKNYWRQLLNAKLITQRKFDNLTKAERGGLS |
| | ELDKAGFIKRQLVETRQITKHVAQILDSRMNTKYDENDKLIREVK |
| | VITLKSKLVSDERKDFQFYKVREINNYHHAHDAYLNAVVGTALIK |
| | KYPKLESEFVYGDYKVYDVRKMIAKSEQEIGKATAKYFFYSNIMN |
| | FFKTEITLANGEIRKRPLIETNGETGEIVWDKGRDFATVRKVLSM |
| | PQVNIVKKTEVQTGGFSKESILPKRNSDKLIARKKDWDPKKYGGF |
| | DSPTVAYSVLVVAKVEKGKSKKLKSVKELLGITIMERSSFEKNPI |
| | DFLEAKGYKEVKKDLIIKLPKYSLFELENGRKRMLASAGELQKGN |
| | ELALPSKYVNFLYLASHYEKLKGSPEDNEQKQLEVEQHKHYLDEI |
| | IEQISEFSKRVILADANLDKVLSAYNKHRDKPIREQAENIIHLFT |
| | LINLGAPAAFKYEDTTIDRKRYTSTKEVLDATLIHQSITGLYETR |
| | IDLSQLGGDSGGSKRTADGSEFEPKKKRKV |
| | (SEQ ID NO: 109) |
| | key |
| | Nuclear localization sequence (NLS) Top:(SEQ |
| | ID NO: 101), |
| | Bottom: (SEQ ID NO: 103) |
| | Cas9(H840A)(SEQ ID NO: 37) |
| | amino acid linker (SEQ ID NO: 128) |
| | M-MLV reverse transcriptase (SEQ ID NO: 81) |
| PE FUSION PROTEIN | MKRTADGSEFESPKKKRKVDKKYSIGLDIGTNSVGWAVITDEYKV |
| CAS9(H840A)-FEN1- | PSKKFKVLGNTDRHSIKKNLIGALLFDSGETAEATRLKRTARRRY |
| MMLV_RT | TRRKNRICYLQEIFSNEMAKVDDSFFHRLEESFLVEEDKKHERHP |
| D200N | IFGNIVDEVAYHEKYPTIYHLRKKLVDSTDKADLRLIYLALAHMI |
| T330P | KFRGHFLIEGDLNPDNSDVDKLFIQLVQTYNQLFEENPINASGVD |
| L603W | AKAILSARLSKSRRLENLIAQLPGEKKNGLFGNLIALSLGLTPNF |
| T306K | KSNFDLAEDAKLQLSKDTYDDDLDNLLAQIGDQYADLFLAAKNLS |
| W313F | DAILLSDILRVNTEITKAPLSASMIKRYDEHHQDLTLLKALVRQQ |
| | LPEKYKEIFFDQSKNGYAGYIDGGASQEEFYKFIKPILEKMDGTE |
| | ELLVKLNREDLLRKQRTFDNGSIPHQIHILGELHAILRRQEDFYP |
| | FLKDNREKIEKILTFRIPYYVGPLARGNSRFAWMTRKSEETITPW |
| | NFEEVVDKGASAQSFIERMTNFDKNLPNEKVLPKHSLLYEYFTVY |
| | NELTKVKYVTEGMRKPAFLSGEQKKAIVDLLFKTNRKVTVKQLKE |
| | DYFKKIECFDSVEISGVEDRENASLGTYHDLLKIIKDKDFLDNEE |
| | NEDILEDIVLTLTLFEDREMIEERLKTYAHLEDDKVMKQLKRRRY |
| | TGWGRLSRKLINGIRDKQSGKTILDELKSDGFANRNFMQLIHDDS |
| | LTFKEDIQKAQVSGQGDSLHEHIANLAGSPAIKKGILQTVKVVDE |
| | LVKVMGRHKPENIVIEMARENQTTQKGQKNSRERMKRIEEGIKEL |
| | GSQILKEHPVENTQLQNEKLYLYYLQNGRDMYVDQELDINRLSDY |
| | DVDAIVPQSFLKDDSIDNKVLTRSDKNRGKSDNVPSEEVVKKMKN |
| | YWRQLLNAKLITQRKEDNLTKAERGGLSELDKAGFIKRQLVETRQ |
| | ITKHVAQILDSRMNTKYDENDKLIREVKVITLKSKLVSDFRKDFQ |
| | FYKVREINNYHHAHDAYLNAVVGTALIKKYPKLESEFVYGDYKVY |
| | DVRKMIAKSEQEIGKATAKYFFYSNIMNFFKTEITLANGEIRKRP |
| | LIETNGETGEIVWDKGRDFATVRKVLSMPQVNIVKKTEVQTGGFS |
| | KESILPKRNSDKLIARKKDWDPKKYGGFDSPTVAYSVLVVAKVEK |
| | GKSKKLKSVKELLGITIMERSSFEKNPIDFLEAKGYKEVKKDLII |
| | KLPKYSLFELENGRKRMLASAGELQKGNELALPSKYVNFLYLASH |
| | YEKLKGSPEDNEQKQLEVEQHKHYLDEHIEQISEFSKRVILADAN |
| | LDKVLSAYNKHRDKPIREQAENHIHLFTLTNLGAPAAFKYFDTTI |
| | DRKRYTSTKEVLDATLIHQSITGLYETRIDLSQLGGDSGGSSGGS |
| | SGSETPGTSESATPESSGGSSGGSSGIQGLAKLIADVAPSAIREN |
| | DIKSYFGRKVAIDASMSIYQFLIAVRQGGDVLQNEEGETTSHLMG |
| | MFYRTIRMMENGIKPVYVFDGKPPQLKSGELAKRSERRAEAEKQL |
| | QQAQAAGAEQEVEKFTKRLVKVTKQHNDECKHLLSLMGIPYLDAP |
| | SEAEASCAALVKAGKVYAAATEDMDCLTFGSPVLMRHLTASEAKK |
| | LPIQEFHLSRILQELGLNQEQFVDLCILLGSDYCESIRGIGPKRA |
| | VDLIQKHKSIEEIVRRLDPNKYPVPENWLHKEAHQLFLEPEVLDP |
| | ESVELKWSEPNEEELIKFMCGEKQFSEERIRSGVKRLSKSRQGST |
| | QGRLDDFFKVTGSLSSAKRKEPEPKGSTKKKAKTGAAGKFKRGKS |
| | GGSSGGSSGSETPGTSESATPESSGGSSGGSSTLNIEDEYRLHET |
| | SKEPDVSLGSTWLSDFPQAWAETGGMGLAVRQAPLIIPLKATSTP |
| | VSIKQYPMSQEARLGIKPHIQRLLDQGILVPCQSPWNTPLLPVKK |
| | PGTNDYRPVQDLREVNKRVEDIHPTVPNPYNLLSGLPPSHQWYTV |
| | LDLKDAFFCLRLHPTSQPLFAFEWRDPEMGISGQLTWTRLPQGFK |
| | NSPTLFNEALHRDLADFRIQHPDLILLQYVDDLLLAATSELDCQQ |
| | GTRALLQTLGNLGYRASAKKAQICQKQVKYLGYLLKEGQRWLTEA |
| | RKETVMGQPTPKTPRQLREFLGKAGFCRLFIPGFAEMAAPLYPLT |
| | KPGTLFNWGPDQQKAYQEIKQALLTAPALGLPDLTKPFELFVDEK |
| | QGYAKGVLTQKLGPWRRPVAYLSKKLDPVAAGWPPCLRMVAAIAV |
| | LTKDAGKLTMGQPLVILAPHAVEALVKQPPDRWLSNARMTHYQAL |
| | LLDTDRVQFGPVVALNPATLLPLPEEGLQHNCLDILAEAHGTRPD |
| | LTDQPLPDADHTWYTDGSSLLQEGQRKAGAAVTTETEVIWAKALP |
| | AGTSAQRAELIALTQALKMAEGKKLNVYTDSRYAFATAHIHGEIY |
| | RRRGWLTSEGKEIKNKDEILALLKALFLPKRLSIIHCPGHQKGHS |
| | AEARGNRMADQAARKAAITETPDTSTLLIENSSPSGGSKRTADGS |
| | EFEPKKKRKV |
| | (SEQ ID NO: 110) |
| | key: |
| | Nuclear localization sequence (NLS) Top:(SEQ |
| | ID NO: 101), |
| | Bottom: (SEQ ID NO: 103) |
| | Cas9(H840A) (SEQ ID NO: 37) |
| | 33-amino acid linker 1 (SEQ ID NO: 102) |
| | M-MLV reverse transcriptase (SEQ ID NO: 98) |
| | 33-amino acid linker 2 (SEQ ID NO: 102) |
| | FEN1 (SEQ ID NO: 113) |

[0549] In other embodiments, the prime editor fusion proteins can be based on SaCas9 or on SpCas9 nickases with altered PAM specificities, such as the following exemplary sequences:

| | |
|---|---|
| SACAS9-M-MLV RT | MKRTADGSEFESPKKKRKVGKRNYILGLDIGITSVGYGIIDYETR |
| PRIME EDITOR | DVIDAGVRLFKEANVENNEGRRSKRGARRLKRRRRHRIQRVKKLL |
| | FDYNLLTDHSELSGINPYEARVKGLSQKLSEEEFSAALLHLAKRR |
| | GVHNVNEVEEDTGNELSTKEQISRNSKALEEKYVAELQLERLKKD |
| | GEVRGSINRFKTSDYVKEAKQLLKVQKAYHQLDQSFIDTYIDLLE |
| | TRRTYYEGPGEGSPFGWKDIKEWYEMLMGHCTYFPEELRSVKYAY |
| | NADLYNALNDLNNLVITRDENEKLEYYEKFQIIENVFKQKKKPTL |
| | KQIAKEILVNEEDIKGYRVTSTGKPEFTNLKVYHDIKDITARKED |
| | ENAELLDQIAKILTIYQSSEDIQEELTNLNSELTQEEIEQISNLK |
| | GYTGTHNLSLKAINLILDELWHTNDNQIAIFNRLKLVPKKVDLSQ |
| | QKEIPTTLVDDFILSPVVKRSFIQSIKVINAIIKKYGLPNDIIIE |
| | LAREKNSKDAQKMINEMQKRNRQTNERIEEIIRTTGKENAKYLIE |
| | KIKLHDMQEGKCLYSLEAIPLEDLLNNPFNYEVDHIPRSVSFDNS |
| | FNNKVLVKQEEASKKGNRTPFQYLSSSDSKISYETFKKHILNLAK |
| | GKGRISKTKKEYLLEERDINRFSVQKDFINRNLVDTRYATRGLMN |
| | LLRSYFRVNNLDVKVKSINGGFTSFLRRKWKFKKERNKGYKHHAE |
| | DALIIANADFIFKEWKKLDKAKKVMENQMFEEKQAESMPEIETEQ |
| | EYKEIFITPHQIKHIKDFKDYKYSHRVDKKPNRELINDTLYSTRK |
| | DDKGNTLIVNNLNGLYDKDNDKLKKLINKSPEKLLMYHHDPQTYQ |
| | KLKLIMEQYGDEKNPLYKYYEETGNYLTKYSKKDNGPVIKKIKYY |
| | GNKLNAHLDITDDYPNSRNKVVKLSLKPYRFDVYLDNGVYKFVTV |
| | KNLDVIKKENYYEVNSKCYEEAKKLKKISNQAEFIASFYNNDLIK |
| | INGELYRVIGVNNDLLNRIEVNMIDITYREYLENMNDKRPPRIIK |
| | TIASKTQSIKKYSTDILGNLYEVKSKKHPQIIKKGSGGSSGGSSG |
| | SETPGTSESATPESSGGSSGGSSTLNIEDEYRLHETSKEPDVSLG |
| | STWLSDFPQAWAETGGMGLAVRQAPLIIPLKATSTPVSIKQYPMS |
| | QEARLGIKPHIQRLLDQGILVPCQSPWNTPLLPVKKPGTNDYRPV |
| | QDLREVNKRVEDIHPTVPNPYNLLSGLPPSHQWYTVLDLKDAFFC |
| | LRLHPTSQPLFAFEWRDPEMGISGQLTWTRLPQGFKNSPTLFDEA |
| | LHRDLADFRIQHPDLILLQYVDDLLLAATSELDCQQGTRALLQTL |
| | GNLGYRASAKKAQICQKQVKYLGYLLKEGQRWLTEARKETVMGQP |
| | TPKTPRQLREFLGTAGFCRLWIPGFAEMAAPLYPLTKTGTLFNWG |
| | PDQQKAYQEIKQALLTAPALGLPDLTKPFELFVDEKQGYAKGVLT |
| | QKLGPWRRPVAYLSKKLDPVAAGWPPCLRMVAAIAVLTKDAGKLT |
| | MGQPLVILAPHAVEALVKQPPDRWLSNARMTHYQALLLDTDRVQF |
| | GPVVALNPATLLPLPEEGLQHNCLDILAEAHGTRPDLTDQPLPDA |
| | DHTWYTDGSSLLQEGQRKAGAAVTTETEVIWAKALPAGTSAQRAE |
| | LIALTQALKMAEGKKLNVYTDSRYAFATAHIHGEIYRRRGLLTSE |
| | GKEIKNKDEILALLKALFLPKRLSIIHCPGHQKGHSAEARGNRMA |
| | DQAARKAAITETPDTSTLLIENSSPSGGSKRTADGSEFEPKKKRK |
| | V |
| | (SEQ ID NO: 114) |
| SPCAS9(H840A)- | MKRTADGSEFESPKKKRKVDKKYSIGLDIGTNSVGWAVITDEYKV |
| VRQR-MALONEY | PSKKFKVLGNTDRHSIKKNLIGALLFDSGETAEATRLKRTARRRY |
| MURINE LEUKEMIA | TRRKNRICYLQEIFSNEMAKVDDSFFHRLEESFLVEEDKKHERHP |
| VIRUS REVERSE | IFGNIVDEVAYHEKYPTIYHLRKKLVDSTDKADLRLIYLALAHMI |
| TRANSCRIPTASE | QKFRGHFLIEGDLNPDNSDVDKLFIQLVQTYNLFEENPINASGVD |
| PRIME EDITOR | AKAILSARLSKSRRLENLIAQLPGEKKNGLFGNLIALSLGLTPNF |
| | AKSNFDLAEDAKLQLSKDTYDDDLDNLLAQIGDQYADLFLAAKNL |
| | SDILLSDILRVNTEITKAPLSASMIKRYDEHHQDLILLKALVRQQ |
| | LPEKYKEIFFDQSKNGYAGYIDGGASQEEFYKFIKPILEKMDGTE |
| | ELLVKLNREDLLRKQRTFDNGSIPHQIHLGELHAILRRQEDFYPF |
| | LKDNREKIEKILTFRIPYYVGPLARGNSRFAWMTRKSEETITPWN |
| | FEEVVDKGASAQSFIERMTNFDKNLPNEKVLPKHSLLYEYFTVYN |
| | ELTKVKYVTEGMRKPAFLSGEQKKAIVDLLFKTNRKVTVKQLKED |
| | YFKKIECFDSVEISGVEDRFNASLGTYHDLLKIIKDKDFLDNEEN |
| | EDILEDIVLTLTLFEDREMIEERLKTYAHLEDDKVMKQLKRRRYT |
| | GWGRLSRKLINGIRDKQSGKTILDFLKSDGFANRNFMQLIHDDSL |
| | TFKEDIQKAQVSGQGDSLHEHIANLAGSPAIKKGILQTVKVVDEL |
| | VKVMGRHKPENIVIEMARENQTTQKGQKNSRERMKRIEEGIKELG |
| | SQILKEHPVENTQLQNEKLYLYYLQNGRDMYVDQELDINRLSDYD |
| | VDAIVPQSFLKDDSIDNKVLTRSDKNRGKSDNVPSEEVVKKMKNY |
| | WRQLLNAKLITQRKEDNLTKAERGGLSELDKAGFIKRQLVETRQI |
| | TKHVAQILDSRMNTKYDENDKLIREVKVITLKSKLVSDFRKDFQF |
| | YKVREINNYHHAHDAYLNAVVGTALIKKYPKLESEFVYGDYKVYD |
| | VRKMIAKSEQEIGKATAKYFFYSNIMNFFKTEITLANGEIRKRPL |
| | IETNGETGEIVWDKGRDFATVRKVLSMPQVNIVKKTEVQTGGFSK |
| | ESILPKRNSDKLIARKKDWDPKKYGGFVSPTVAYSVLVVAKVEKG |
| | KSKKLKSVKELLGITIMERSSFEKNPIDFLEAKGYKEVKKDLIIK |
| | LPKYSLFELENGRKRMLASARELQKGNELALPSKYVNFLYLASHY |
| | EKLKGSPEDNEQKQLFVEQHKHYLDEIIEQISEFSKRVILADANL |
| | DKVLSAYNKHRDKPIREQAENIIHLFTLTNLGAPAAFKYFDTTID |
| | RKQYRSTKEVLDATLIHQSITGLYETRIDLSQLGGDSGGSSGGSS |
| | GSETPGTSESATPESSGGSSGGSSTLNIEDEYRLHETSKEPDVSL |
| | GSTWLSDFPQAWAETGGMGLAVRQAPLIIPLKATSTPVSIKQYPM |
| | SQEARLGIKPHIQRLLDQGILVPCQSPWNTPLLPVKKPGTNDYRP |
| | VQDLREVNKRVEDIHPTVPNPYNLLSGLPPSHQWYTVLDLKDAFF |
| | CLRLHPTSQPLFAFEWRDPEMGISGQLTWTRLPQGFKNSPTLFNE |
| | ALHRDLADFRIQHPDLILLQYVDDLLLAATSELDCQQGTRALLQT |
| | LGNLGYRASAKKAQICQKQVKYLGYLLKEGQRWLTEARKETVMGQ |
| | PTPKTPRQLREFLGKAGFCRLFIPGFAEMAAPLYPLTKPGTLFNW |
| | GPDQQKAYQEIKQALLTAPALGLPDLTKPFELFVDEKQGYAKGVL |
| | TQKLGPWRRPVAYLSKKLDPVAAGWPPCLRMVAAIAVLTKDAGKL |
| | TMGQPLVILAPHAVEALVKQPPDRWLSNARMTHYQALLLDTDRVQ |
| | FGPVVALNPATLLPLPEEGLQHNCLDILAEAHGTRPDLTDQPLPD |
| | ADHTWYTDGSSLLQEGQRKAGAAVTTETEVIWAKALPAGTSAQRA |
| | ELIALTQALKMAEGKKLNVYTDSRYAFATAHIHGEIYRRRGWLTS |
| | EGKEIKNKDEILALLKALFLPKRLSIIHCPGHQKGHSAEARGNRM |
| | ADQAARKAAITETPDTSTLLIENSSPSGGSKRTADGSEFEPKKKR |
| | KV |
| | (SEQ ID NO: 115) |
| SPCAS9(H840A)- | MKRTADGSEFESPKKKRKVDKKYSIGLDIGTNSVGWAVITDEYKV |
| VRER-MALONEY | PSKKFKVLGNTDRHSIKKNLIGALLFDSGETAEATRLKRTARRRY |
| MURINE LEUKEMIA | TRRKNRICYLQEIFSNEMAKVDDSFFHRLEESFLVEEDKKHERHP |
| VIRUS REVERSE | IFGNIVDEVAYHEKYPTIYHLRKKLVDSTDKADLRLIYLALAHMI |
| TRANSCRIPTASE | KFRGHFLIEGDLNPDNSDVDKLFIQLVQTYNQLFEENPINASGVD |
| PRIME EDITOR | AKAILSARLSKSRRLENLIAQLPGEKKNGLFGNLIALSLGLTPNF |
| | KSNFDLAEDAKLQLSKDTYDDDLDNLLAQIGDQYADLFLAAKNLS |
| | DAILLSDILRVNTEITKAPLSASMIKRYDEHHQDLTLLKALVRQQ |
| | LPEKYKEIFFDQSKNGYAGYIDGGASQEEFYKFIKPILEKMDGTE |
| | ELLVKLNREDLLRKQRTFDNGSIPHQIHLGELHAILRRQEDFYPF |
| | LKDNREKIEKILTFRIPYYVGPLARGNSRFAWMTRKSEETITPWN |
| | FEEVVDKGASAQSFIERMTNFDKNLPNEKVLPKHSLLYEYFTVYN |
| | ELTKVKYVTEGMRKPAFLSGEQKKAIVDLLFKTNRKVTVKQLKED |
| | YFKKIECFDSVEISGVEDRFNASLGTYHDLLKIIKDKDFLDNEEN |
| | EDILEDIVLTLTLFEDREMIEERLKTYAHLEDDKVMKQLKRRRYT |
| | GWGRLSRKLINGIRDKQSGKTILDFLKSDGFANRNFMQLIHDDSL |
| | TFKEDIQKAQVSGQGDSLHEHIANLAGSPAIKKGILQTVKVVDEL |
| | VKVMGRHKPENIVIEMARENQTTQKGQKNSRERMKRIEEGIKELG |
| | SQILKEHPVENTQLQNEKLYLYYLQNGRDMYVDQELDINRLSDYD |
| | VDAIVPQSFLKDDSIDNKVLTRSDKNRGKSDNVPSEEVVKKMKNY |
| | WRQLLNAKLITQRKFDNLTKAERGGLSELDKAGFIKRQLVETRQI |
| | TKHVAQILDSRMNTKYDENDKLIREVKVITLKSKLVSDFRKDFQF |
| | YKVREINNYHHAHDAYLNAVVGTALIKKYPKLESEFVYGDYKVYD |
| | VRKMIAKSEQEIGKATAKYFFYSNIMNFFKTEITLANGEIRKRPL |
| | IETNGETGEIVWDKGRDFATVRKVLSMPQVNIVKKTEVQTGGFSK |
| | ESILPKRNSDKLIARKKDWDPKKYGGFVSPTVAYSVLVVAKVEKG |
| | KSKKLKSVKELLGITIMERSSFEKNPIDFLEAKGYKEVKKDLIKL |
| | PKYSLFELENGRKRMLASARELQKGNELALPSKYVNFLYLASHYE |
| | KLKGSPEDNEQKQLFVEQHKHYLDEHEQISEFSKRVILADANLDK |
| | VLSAYNKHRDKPIREQAENIIHLFTLTNLGAPAAFKYFDTTIDRK |
| | EYRSTKEVLDATLIHQSITGLYETRIDLSQLGGDSGGSSGGSSGS |
| | ETPGTSESATPESSGGSSGGSSTLNIEDEYRLHETSKEPDVSLGS |
| | TWLSDFPQAWAETGGMGLAVRQAPLIIPLKATSTPVSIKQYPMSQ |
| | EARLGIKPHIQRLLDQGILVPCQSPWNTPLLPVKKPGTNDYRPVQ |
| | DLREVNKRVEDIHPTVPNPYNLLSGLPPSHQWYTVLDLKDAFFCL |
| | RLHPTSQPLFAFEWRDPEMGISGQLTWTRLPQGFKNSPTLFNEAL |
| | HRDLADFRIQHPDLILLQYVDDLLLAATSELDCQQGTRALLQTLG |
| | NLGYRASAKKAQICQKQVKYLGYLLKEGQRWLTEARKETVMGQPT |
| | PKTPRQLREFLGKAGFCRLFIPGFAEMAAPLYPLTKPGTLFNWGP |
| | DQQKAYQEIKQALLTAPALGLPDLTKPFELFVDEKQGYAKGVLTQ |
| | KLGPWRRPVAYLSKKLDPVAAGWPPCLRMVAAIAVLTKDAGKLTM |
| | GQPLVILAPHAVEALVKQPPDRWLSNARMTHYQALLLDTDRVQFG |
| | PVVALNPATLLPLPEEGLQHNCLDILAEAHGTRPDLTDQPLPDAD |
| | HTWYTDGSSLLQEGQRKAGAAVTTETEVIWAKALPAGTSAQRAEL |
| | IALTQALKMAEGKKLNVYTDSRYAFATAHIHGEIYRRRGWLTSEG |
| | KEIKNKDEILALLKALFLPKRLSIIHCPGHQKGHSAEARGNRMAD |
| | QAARKAAITETPDTSTLLIENSSPSGGSKRTADGSEFEPKKKRKV |
| | (SEQ ID NO: 116) |

[0550] In yet other embodiments, the prime editor fusion proteins utilized in the methods and compositions contemplated herein may include a Cas9 nickase (e.g., Cas9 (H840A)) fused to a truncated version of M-MLV reverse transcriptase. In this embodiment, the reverse transcriptase also contains 4 mutations (D200N. T306K, W313F, T330P; noting that the L603W mutation present in PE2 is no longer present due to the truncation). The DNA sequence encoding this truncated editor is 522 bp smaller than PE2, and therefore makes its potentially useful for applications where delivery of the DNA sequence is challenging due to its size (i.e., adeno-associated virus and lentivirus delivery). This embodiment is referred to as Cas9(H840A)-MMLV-RT(trunc) or “PE2-short” or “PE2-trune” and has the following amino acid sequence:

| | |
|---|---|
| CAS9(H840A)- | MKRTADGSEFESPKKKRKVDKKYSIGLDIGTNSVGWAVITDEYKVPSKKF |
| MMLV-RT(TRUNC) | KVLGNTDRHSIKKNLIGALLFDSGETAEATRLKRTARRRYTRRKNRICYL |
| OR PE2-SHORT | QEIFSNEMAKVDDSFFHRLEESFLVEEDKKHERHPIFGNIVDEVAYHEKY |
| | PTIYHLRKKLVDSTDKADLRLIYLALAHMIKERGHFLIEGDLNPDNSDVD |
| | KLFIQLVQTYNQLFEENPINASGVDAKAILSARLSKSRRLENLIAQLPGE |
| | KKNGLFGNLIALSLGLTPNFKSNFDLAEDAKLQLSKDTYDDDLDNLLAQI |
| | GDQYADLFLAAKNLSDAILLSDILRVNTEITKAPLSASMIKRYDEHHQDL |
| | TLLKALVRQQLPEKYKEIFFDQSKNGYAGYIDGGASQEEFYKFIKPILEK |
| | MDGTEELLVKLNREDLLRKQRTFDNGSIPHQIHLGELHAILRRQEDFYPF |
| | LKDNREKIEKILTFRIPYYVGPLARGNSRFAWMTRKSEETITPWNFEEVV |
| | DKGASAQSFIERMTNFDKNLPNEKVLPKHSLLYEYFTVYNELTKVKYVTE |
| | GMRKPAFLSGEQKKAIVDLLFKTNRKVTVKQLKEDYFKKIECFDSVEISG |
| | VEDRFNASLGTYHDLLKIIKDKDELDNEENEDILEDIVLTLTLFEDREMI |
| | EERLKTYAHLEDDKVMKQLKRRRYTGWGRLSRKLINGIRDKQSGKTILDE |
| | LKSDGFANRNFMQLIHDDSLTFKEDIQKAQVSGQGDSLHEHIANLAGSPA |
| | IKKGILQTVKVVDELVKVMGRHKPENIVIEMARENQTTQKGQKNSRERMK |
| | RIEEGIKELGSQILKEHPVENTQLQNEKLYLYYLQNGRDMYVDQELDINR |
| | LSDYDVDAIVPQSFLKDDSIDNKVLTRSDKNRGKSDNVPSEEVVKKMKNY |
| | WRQLLNAKLITQRKFDNLTKAERGGLSELDKAGFIKRQLVETRQITKHVA |
| | QILDSRMNTKYDENDKLIREVKVITLKSKLVSDFRKDFQFYKVREINNYH |
| | HAHDAYLNAVVGTALIKKYPKLESEFVYGDYKVYDVRKMIAKSEQEIGKA |
| | TAKYFFYSNIMNFFKTEITLANGEIRKRPLIETNGETGEIVWDKGRDFAT |
| | VRKVLSMPQVNIVKKTEVQTGGFSKESILPKRNSDKLIARKKDWDPKKYG |
| | GFDSPTVAYSVLVVAKVEKGKSKKLKSVKELLGITIMERSSFEKNPIDFL |
| | EAKGYKEVKKDLIIKLPKYSLFELENGRKRMLASAGELQKGNELALPSKY |
| | VNFLYLASHYEKLKGSPEDNEQKQLFVEQHKHYLDEHIEQISEFSKRVIL |
| | ADANLDKVLSAYNKHRDKPIREQAENIIHLFTLTNLGAPAAFKYFDTTID |
| | RKRYTSTKEVLDATLIHQSITGLYETRIDLSQLGGDSGGSSGGSSGSETP |
| | GTSESATPESSGGSSGGSSTLNIEDEYRLHETSKEPDVSLGSTWLSDFPQ |
| | AWAETGGMGLAVRQAPLIIPLKATSTPVSIKQYPMSQEARLGIKPHIQRL |
| | LDQGILVPCQSPWNTPLLPVKKPGTNDYRPVQDLREVNKRVEDIHPTVPN |
| | PYNLLSGLPPSHQWYTVLDLKDAFFCLRLHPTSQPLFAFEWRDPEMGISG |
| | QLTWTRLPQGFKNSPTLFNEALHRDLADFRIQHPDLILLQYVDDLLLAAT |
| | SELDCQQGTRALLQTLGNLGYRASAKKAQICQKQVKYLGYLLKEGQRWLT |
| | EARKETVMGQPTPKTPRQLREFLGKAGFCRLFIPGFAEMAAPLYPLTKPG |
| | TLFNWGPDQQKAYQEIKQALLTAPALGLPDLTKPFELFVDEKQGYAKGVL |
| | TQKLGPWRRPVAYLSKKLDPVAAGWPPCLRMVAAIAVLTKDAGKLTMGQP |
| | LVILAPHAVEALVKQPPDRWLSNARMTHYQALLLDTDRVQFGPVVALNPA |
| | TLLPLPEEGLQHNCLDNSRLINSGGSKRTADGSEFEPKKKRKV |
| | (SEQ ID NO: 117) |
| | KEY: |
| | NUCLEAR LOCALIZATION SEQUENCE (NLS) TOP: |
| | (SEQ ID NO: 101), |
| | BOTTOM: (SEQ ID NO: 103) |
| | CAS9(H840A) (SEQ ID NO: 37) |
| | 33-AMINO ACID LINKER 1 (SEQ ID NO: 102) |
| | M-MLV TRUNCATED reverse transcriptase |
| | (SEQ ID NO: 80) |

[0551] In various embodiments, the prime editor fusion proteins utilized in the methods and compositions contemplated herein may also include any variants of the above-disclosed sequences having an amino acid sequence that is at least about 70% identical, at least about 80% identical, at least about 90% identical, at least about 95% identical, at least about 96% identical, at least about 97% identical, at least about 98% identical, at least about 99% identical, at least about 99.5% identical, or at least about 99.9% identical to PE1, PE2, or any of the above indicated prime editor fusion sequences.

[0552] In certain embodiments, linkers may be used to link any of the peptides or peptide domains or moieties of the invention (e.g., a napDNAbp linked or fused to a reverse transcriptase).

### Prime Editors: Modified PE Fusion Proteins (e.g., PEmax)

[0553] In one aspect, the present disclosure provides modified prime editor proteins. In one embodiment, the modified prime editor fusion protein is PEmax (of SEQ ID NO: 99), or an amino acid sequence having at least 80%, at least 85%, at least 90%, at least 95%, at least 96%, at least 97%, at least 98%, at least 99%, or at least up to 100% sequence identify with SEQ ID NO: 99. The sequence of PEmax is as follows:

KEY:
Bipartite SV40 NLS
SpCas9 R221K N394K H840A
Linker = (SGGSx2-bipartite SV40 NLS-SGGSx2)
(SGGSSGGS KRTADGSEFESPKKKRKV SGGSSGGS) (SEQ ID NO: 105)
Genscript codon optimized MMLV RT pentamutant
(D200N T306K W313F T330P L603W)
Other linker sequences
c-Myc NLS
PEmax protein sequence (SEQ ID NO: 99):
MKRTADGSEFESPKKKRKVDKKYSIGLDIGTNSVGWAVITDEYKVPSKKFKVLGNTDRHS
IKKNLIGALLFDSGETAEATRLKRTARRRYTRRKNRICYLQEIFSNEMAKVDDSFFHRLE
ESFLVEEDKKHERHPIFGNIVDEVAYHEKYPTIYHLRKKLVDSTDKADLRLIYLALAHMI
KFRGHFLIEGDLNPDNSDVDKLFIQLVQTYNQLFEENPINASGVDAKAILSARLSKSRKL
ENLIAQLPGEKKNGLFGNLIALSLGLTPNFKSNFDLAEDAKLQLSKDTYDDDLDNLLAQI
GDQYADLFLAAKNLSDAILLSDILRVNTEITKAPLSASMIKRYDEHHQDLTLLKALVRQQ
LPEKYKEIFFDQSKNGYAGYIDGGASQEEFYKFIKPILEKMDGTEELLVKLKREDLLRKQ
RTFDNGSIPHQIHLGELHAILRRQEDFYPFLKDNREKIEKILTFRIPYYVGPLARGNSRF
AWMTRKSEETITPWNFEEVVDKGASAQSFIERMTNFDKNLPNEKVLPKHSLLYEYFTVYN
ELTKVKYVTEGMRKPAFLSGEQKKAIVDLLFKTNRKVTVKQLKEDYFKKIECFDSVEISG
VEDRFNASLGTYHDLLKIIKDKDFLDNEENEDILEDIVLTLTLFEDREMIEERLKTYAHL
FDDKVMKQLKRRRYTGWGRLSRKLINGIRDKQSGKTILDFLKSDGFANRNFMQLIHDDSL
TFKEDIQKAQVSGQGDSLHEHIANLAGSPAIKKGILQTVKVVDELVKVMGRHKPENIVIE
MARENQTTQKGQKNSRERMKRIEEGIKELGSQILKEHPVENTQLQNEKLYLYYLQNGRDM
YVDQELDINRLSDYDVDAIVPQSFLKDDSIDNKVLTRSDKNRGKSDNVPSEEVVKKMKNY
WRQLLNAKLITQRKEDNLTKAERGGLSELDKAGFIKRQLVETRQITKHVAQILDSRMNTK
YDENDKLIREVKVITLKSKLVSDFRKDFQFYKVREINNYHHAHDAYLNAVVGTALIKKYP
KLESEFVYGDYKVYDVRKMIAKSEQEIGKATAKYFFYSNIMNFFKTEITLANGEIRKRPL
IETNGETGEIVWDKGRDFATVRKVLSMPQVNIVKKTEVQTGGFSKESILPKRNSDKLIAR
KKDWDPKKYGGFDSPTVAYSVLVVAKVEKGKSKKLKSVKELLGITIMERSSFEKNPIDFL
EAKGYKEVKKDLIIKLPKYSLFELENGRKRMLASAGELQKGNELALPSKYVNFLYLASHY
EKLKGSPEDNEQKQLFVEQHKHYLDEIEQISEFSKRVILADANLDKVLSAYNKHRDKPIR
EQAENIIHLFTLTNLGAPAAFKYFDTTIDRKRYTSTKEVLDATLIHQSITGLYETRIDLS
QLGGDSGGSSGGSKRTADGSEFESPKKKRKVSGGSSGGSTLNIEDEYRLHETSKEPDVSL
GSTWLSDFPQAWAETGGMGLAVRQAPLIIPLKATSTPVSIKQYPMSQEARLGIKPHIQRL
LDQGILVPCQSPWNTPLLPVKKPGTNDYRPVQDLREVNKRVEDIHPTVPNPYNLLSGLPP
SHQWYTVLDLKDAFFCLRLHPTSQPLFAFEWRDPEMGISGQLTWTRLPQGFKNSPTLFNE
ALHRDLADFRIQHPDLILLQYVDDLLLAATSELDCQQGTRALLQTLGNLGYRASAKKAQI
CQKQVKYLGYLLKEGQRWLTEARKETVMGQPTPKTPRQLREFLGKAGFCRLFIPGFAEMA
APLYPLTKPGTLFNWGPDQQKAYQEIKQALLTAPALGLPDLTKPFELFVDEKQGYAKGVL
TQKLGPWRRPVAYLSKKLDPVAAGWPPCLRMVAAIAVLTKDAGKLTMGQPLVILAPHAVE
ALVKQPPDRWLSNARMTHYQALLLDTDRVQFGPVVALNPATLLPLPEEGLQHNCLDILAE
AHGTRPDLTDQPLPDADHTWYTDGSSLLQEGQRKAGAAVTTETEVIWAKALPAGTSAQRA
ELIALTQALKMAEGKKLNVYTDSRYAFATAHIHGEIYRRRGWLTSEGKEIKNKDEILALL
KALFLPKRLSIIHCPGHQKGHSAEARGNRMADQAARKAAITETPDTSTLLIENSSPSGGS
KRTADGSEFESPKKKRKVGSGPAAKRVKLD
PEmax DNA sequence (SEQ ID NO: 5660):
ATGAAACGGACAGCCGACGGAAGCGAGTTCGAGTCACCAAAGAAGAAGCGGAAAGTCGAC
AAGAAGTACAGCATCGGCCTGGACATCGGCACCAACTCTGTGGGCTGGGCCGTGATCACC
GACGAGTACAAGGTGCCCAGCAAGAAATTCAAGGTGCTGGGCAACACCGACCGGCACAGC
ATCAAGAAGAACCTGATCGGAGCCCTGCTGTTCGACAGCGGCGAAACAGCCGAGGCCACC
CGGCTGAAGAGAACCGCCAGAAGAAGATACACCAGACGGAAGAACCGGATCTGCTATCTG
CAAGAGATCTTCAGCAACGAGATGGCCAAGGTGGACGACAGCTTCTTCCACAGACTGGAA
GAGTCCTTCCTGGTGGAAGAGGATAAGAAGCACGAGCGGCACCCCATCTTCGGCAACATC
GTGGACGAGGTGGCCTACCACGAGAAGTACCCCACCATCTACCACCTGAGAAAGAAACTG
GTGGACAGCACCGACAAGGCCGACCTGCGGCTGATCTATCTGGCCCTGGCCCACATGATC
AAGTTCCGGGGCCACTTCCTGATCGAGGGCGACCTGAACCCCGACAACAGCGACGTGGAC
AAGCTGTTCATCCAGCTGGTGCAGACCTACAACCAGCTGTTCGAGGAAAACCCCATCAAC
GCCAGCGGCGTGGACGCCAAGGCCATCCTGTCTGCCAGACTGAGCAAGAGCAGAAAGCTG
GAAAATCTGATCGCCCAGCTGCCCGGCGAGAAGAAGAATGGCCTGTTCGGAAACCTGATT
GCCCTGAGCCTGGGCCTGACCCCCAACTTCAAGAGCAACTTCGACCTGGCCGAGGATGCC
AAACTGCAGCTGAGCAAGGACACCTACGACGACGACCTGGACAACCTGCTGGCCCAGATC
GGCGACCAGTACGCCGACCTGTTTCTGGCCGCCAAGAACCTGTCCGACGCCATCCTGCTG
AGCGACATCCTGAGAGTGAACACCGAGATCACCAAGGCCCCCCTGAGCGCCTCTATGATC
AAGAGATACGACGAGCACCACCAGGACCTGACCCTGCTGAAAGCTCTCGTGCGGCAGCAG
CTGCCTGAGAAGTACAAAGAGATTTTCTTCGACCAGAGCAAGAACGGCTACGCCGGCTAC
ATTGACGGCGGAGCCAGCCAGGAAGAGTTCTACAAGTTCATCAAGCCCATCCTGGAAAAG
ATGGACGGCACCGAGGAACTGCTCGTGAAGCTGAAGAGAGAGGACCTGCTGCGGAAGCAG
CGGACCTTCGACAACGGCAGCATCCCCCACCAGATCCACCTGGGAGAGCTGCACGCCATT
CTGCGGCGGCAGGAAGATTTTTACCCATTCCTGAAGGACAACCGGGAAAAGATCGAGAAG
ATCCTGACCTTCCGCATCCCCTACTACGTGGGCCCTCTGGCCAGGGGAAACAGCAGATTC
GCCTGGATGACCAGAAAGAGCGAGGAAACCATCACCCCCTGGAACTTCGAGGAAGTGGTG
GACAAGGGCGCTTCCGCCCAGAGCTTCATCGAGCGGATGACCAACTTCGATAAGAACCTG
CCCAACGAGAAGGTGCTGCCCAAGCACAGCCTGCTGTACGAGTACTTCACCGTGTATAAC
GAGCTGACCAAAGTGAAATACGTGACCGAGGGAATGAGAAAGCCCGCCTTCCTGAGCGGC
GAGCAGAAAAAGGCCATCGTGGACCTGCTGTTCAAGACCAACCGGAAAGTGACCGTGAAG
CAGCTGAAAGAGGACTACTTCAAGAAAATCGAGTGCTTCGACTCCGTGGAAATCTCCGGC
GTGGAAGATCGGTTCAACGCCTCCCTGGGCACATACCACGATCTGCTGAAAATTATCAAG
GACAAGGACTTCCTGGACAATGAGGAAAACGAGGACATTCTGGAAGATATCGTGCTGACC
CTGACACTGTTTGAGGACAGAGAGATGATCGAGGAACGGCTGAAAACCTATGCCCACCTG
TTCGACGACAAAGTGATGAAGCAGCTGAAGCGGCGGAGATACACCGGCTGGGGCAGGCTG
AGCCGGAAGCTGATCAACGGCATCCGGGACAAGCAGTCCGGCAAGACAATCCTGGATTTC
CTGAAGTCCGACGGCTTCGCCAACAGAAACTTCATGCAGCTGATCCACGACGACAGCCTG
ACCTTTAAAGAGGACATCCAGAAAGCCCAGGTGTCCGGCCAGGGCGATAGCCTGCACGAG
CACATTGCCAATCTGGCCGGCAGCCCCGCCATTAAGAAGGGCATCCTGCAGACAGTGAAG
GTGGTGGACGAGCTCGTGAAAGTGATGGGCCGGCACAAGCCCGAGAACATCGTGATCGAA
ATGGCCAGAGAGAACCAGACCACCCAGAAGGGACAGAAGAACAGCCGCGAGAGAATGAAG
CGGATCGAAGAGGGCATCAAAGAGCTGGGCAGCCAGATCCTGAAAGAACACCCCGTGGAA
AACACCCAGCTGCAGAACGAGAAGCTGTACCTGTACTACCTGCAGAATGGGCGGGATATG
TACGTGGACCAGGAACTGGACATCAACCGGCTGTCCGACTACGATGTGGACGCTATCGTG
CCTCAGAGCTTTCTGAAGGACGACTCCATCGACAACAAGGTGCTGACCAGAAGCGACAAG
AACCGGGGCAAGAGCGACAACGTGCCCTCCGAAGAGGTCGTGAAGAAGATGAAGAACTAC
TGGCGGCAGCTGCTGAACGCCAAGCTGATTACCCAGAGAAAGTTCGACAATCTGACCAAG
GCCGAGAGAGOCGGCCTGAGCGAACTGGATAAGGCCGGCTTCATCAAGAGACAGCTGGTG
GAAACCCGGCAGATCACAAAGCACGTGGCACAGATCCTGGACTCCCGGATGAACACTAAG
TACGACGAGAATGACAAGCTGATCCGGGAAGTGAAAGTGATCACCCTGAAGTCCAAGCTG
GTGTCCGATTTCCGGAAGGATTTCCAGTTTTACAAAGTGCGCGAGATCAACAACTACCAC
CACGCCCACGACGCCTACCTGAACGCCGTCGTGGGAACCGCCCTGATCAAAAAGTACCCT
AAGCTGGAAAGCGAGTTCGTGTACGGCGACTACAAGGTGTACGACGTGCGGAAGATGATC
GCCAAGAGCGAGCAGGAAATCGGCAAGGCTACCGCCAAGTACTTCTTCTACAGCAACATC
ATGAACTTTTTCAAGACCGAGATTACCCTGGCCAACGGCGAGATCCGGAAGCGGCCTCTG
ATCGAGACAAACGGCGAAACCGGGGAGATCGTGTGGGATAAGGGCCGGGATTTTGCCACC
GTGCGGAAAGTGCTGAGCATGCCCCAAGTGAATATCGTGAAAAAGACCGAGGTGCAGACA
GGCGGCTTCAGCAAAGAGTCTATCCTGCCCAAGAGGAACAGCGATAAGCTGATCGCCAGA
AAGAAGGACTGGGACCCTAAGAAGTACGGCGGCTTCGACAGCCCCACCGTGGCCTATTCT
GTGCTGGTGGTGGCCAAAGTGGAAAAGGGCAAGTCCAAGAAACTGAAGAGTGTGAAAGAG
CTGCTGGGGATCACCATCATGGAAAGAAGCAGCTTCGAGAAGAATCCCATCGACTTTCTG
GAAGCCAAGGGCTACAAAGAAGTGAAAAAGGACCTGATCATCAAGCTGCCTAAGTACTCC
CTGTTCGAGCTGGAAAACGGCCGGAAGAGAATGCTGGCCTCTGCCGGCGAACTGCAGAAG
GGAAACGAACTGGCCCTGCCCTCCAAATATGTGAACTTCCTGTACCTGGCCAGCCACTAT
GAGAAGCTGAAGGGCTCCCCCGAGGATAATGAGCAGAAACAGCTGTTTGTGGAACAGCAC
AAGCACTACCTGGACGAGATCATCGAGCAGATCAGCGAGTTCTCCAAGAGAGTGATCCTG
GCCGACGCTAATCTGGACAAAGTGCTGTCCGCCTACAACAAGCACCGGGATAAGCCCATC
AGAGAGCAGGCCGAGAATATCATCCACCTGTTTACCCTGACCAATCTGGGAGCCCCTGCC
GCCTTCAAGTACTTTGACACCACCATCGACCGGAAGAGGTACACCAGCACCAAAGAGGTG
CTGGACGCCACCCTGATCCACCAGAGCATCACCGGCCTGTACGAGACACGGATCGACCTG
TCTCAGCTGGGAGGTGACTCCGGCGGAAGCTCTGGTGGCAGCAAGCGGACCGCCGACGGC
TCTGAATTCGAGAGCCCTAAGAAGAAAAGAAAGGTGAGCGGAGGCTCTAGCGGCGGAAGC
ACCCTGAACATTGAAGACGAGTATAGACTGCATGAAACAAGCAAGGAACCCGACGTGTCC
CTGGGCTCCACCTGGCTGTCCGACTTTCCCCAGGCCTGGGCCGAGACAGGAGGAATGGGC
CTGGCCGTGCGGCAGGCACCCCTGATCATCCCTCTGAAGGCCACCTCTACACCCGTGAGC
ATCAAGCAGTACCCTATGTCTCAGGAGGCCAGACTGGGCATCAAGCCTCACATCCAGAGG
CTGCTGGACCAGGGCATCCTGGTGCCATGCCAGAGCCCCTGGAACACACCACTGCTGCCC
GTGAAGAAGCCAGGCACCAATGACTATAGACCCGTGCAGGATCTGAGAGAGGTGAACAAG
AGGGTGGAGGATATCCACCCCACCGTGCCCAACCCTTACAATCTGCTGTCCGGCCTGCCC
CCTTCTCACCAGTGGTATACAGTGCTGGACCTGAAGGATGCCTTCTTTTGTCTGAGACTG
CACCCTACCAGCCAGCCACTGTTCGCCTTTGAGTGGAGGGACCCTGAGATGGGCATCTCT
GGCCAGCTGACCTGGACACGCCTGCCTCAGGGCTTCAAGAATAGCCCAACACTGTTTAAC
GAGGCCCTGCACCGCGACCTGGCAGATTTCCGGATCCAGCACCCAGATCTGATCCTGCTG
CAGTACGTGGACGATCTGCTGCTGGCCGCCACCAGCGAGCTGGATTGCCAGCAGGGAACA
CGCGCCCTGCTGCAGACCCTGGGAAACCTGGGATATAGGGCATCCGCCAAGAAGGCCCAG
ATCTGTCAGAAGCAGGTGAAGTACCTGGGCTATCTGCTGAAGGAGGGCCAGAGATGGCTG
ACAGAGGCCAGGAAGGAGACAGTGATGGGCCAGCCAACACCCAAGACCCCAAGACAGCTG
AGGGAGTTCCTGGGCAAAGCAGGATTTTGCAGGCTGTTCATCCCAGGATTCGCAGAGATG
GCAGCACCTCTGTACCCACTGACCAAGCCGGGCACCCTGTTTAATTGGGGCCCTGACCAG
CAGAAGGCCTATCAGGAGATCAAGCAGGCCCTGCTGACAGCACCAGCCCTGGGCCTGCCA
GACCTGACCAAGCCTTTCGAGCTGTTTGTGGATGAGAAGCAGGGCTACGCCAAGGGCGTG
CTGACCCAGAAGCTGGGACCATGGAGACGGCCCGTGGCCTATCTGTCCAAGAAGCTGGAC
CCAGTGGCAGCAGGATGGCCACCATGCCTGAGGATGGTGGCAGCAATCGCCGTGCTGACA
AAGGATGCCGGCAAGCTGACCATGGGACAGCCACTGGTCATCCTGGCACCACACGCAGTG
GAGGCCCTGGTGAAGCAGCCTCCAGATCGCTGGCTGTCTAACGCCCGGATGACACACTAC
CAGGCCCTGCTGCTGGACACCGATCGCGTGCAGTTTGGCCCTGTGGTGGCCCTGAATCCA
GCCACCCTGCTGCCTCTGCCAGAGGAGGGCCTGCAGCACAACTGTCTGGACATCCTGGCA
GAGGCACACGGAACAAGGCCAGACCTGACCGATCAGCCCCTGCCTGACGCCGATCACACA
TGGTATACCGATGGAAGCTCCCTGCTGCAGGAGGGCCAGAGGAAGGCAGGAGCAGCAGTG
ACCACAGAGACAGAAGTGATCTGGGCCAAGGCCCTGCCAGCAGGCACATCCGCCCAGCGG
GCCGAGCTGATCGCCCTGACCCAGGCCCTGAAGATGGCCGAGGGCAAGAAGCTGAACGTG
TACACAGACTCCAGATATGCCTTCGCCACCGCACACATCCACGGAGAGATCTACAGGCGC
CGGGGCTGGCTGACCTCTGAGGGCAAGGAGATCAAGAACAAGGATGAGATCCTGGCCCTG
CTGAAGGCCCTGTTTCTGCCCAAGCGGCTGAGCATCATCCACTGTCCTGGACACCAGAAG
GGACACTCCGCCGAGGCAAGGGGCAATCGGATGGCCGACCAGGCCGCCAGAAAGGCTGCT
ATTACTGAAACTCCCGACACTTCCACTCTGCTGATTGAAAACTCCTCCCCTTCTGGCGGC
TCAAAAAGAACCGCCGACGGCAGCGAATTCGAGTCTCCCAAGAAGAAGAGGAAAGTCGGC
TCTGGCCCTGCCGCTAAGAGAGTGAAGCTGGAC
PEmax component sequences of SEQ ID NO: 99:
Bipartite SV40 NLS:
MKRTADGSEFESPKKKRKV (SEQ ID NO: 101)
SpCas9 R221K N394K H840A:
DKKYSIGLDIGTNSVGWAVITDEYKVPSKKFKVLGNTDRHSIKKNLIGALLFDSGETAEA
TRLKRTARRRYTRRKNRICYLQEIFSNEMAKVDDSFFHRLEESFLVEEDKKHERHPIFGN
IVDEVAYHEKYPTIYHLRKKLVDSTDKADLRLIYLALAHMIKFRGHFLIEGDLNPDNSDV
DKLFIQLVQTYNQLFEENPINASGVDAKAILSARLSKSRKLENLIAQLPGEKKNGLFGNL
IALSLGLTPNFKSNFDLAEDAKLQLSKDTYDDDLDNLLAQIGDQYADLFLAAKNLSDAIL
LSDILRVNTEITKAPLSASMIKRYDEHHQDLTLLKALVRQQLPEKYKEIFFDQSKNGYAG
YIDGGASQEEFYKFIKPILEKMDGTEELLVKLKREDLLRKQRTFDNGSIPHQIHLGELHA
ILRRQEDFYPFLKDNREKIEKILTFRIPYYVGPLARGNSRFAWMTRKSEETITPWNFEEV
VDKGASAQSFIERMTNFDKNLPNEKVLPKHSLLYEYFTVYNELTKVKYVTEGMRKPAFLS
GEQKKAIVDLLFKTNRKVTVKQLKEDYFKKIECFDSVEISGVEDRFNASLGTYHDLLKII
KDKDFLDNEENEDILEDIVLTLTLFEDREMIEERLKTYAHLFDDKVMKQLKRRRYTGWGR
LSRKLINGIRDKQSGKTILDFLKSDGFANRNFMQLIHDDSLTFKEDIQKAQVSGQGDSLH
EHIANLAGSPAIKKGILQTVKVVDELVKVMGRHKPENIVIEMARENQTTQKGQKNSRERM
KRIEEGIKELGSQILKEHPVENTQLQNEKLYLYYLQNGRDMYVDQELDINRLSDYDVDAI
VPQSFLKDDSIDNKVLTRSDKNRGKSDNVPSEEVVKKMKNYWRQLLNAKLITQRKFDNLT
KAERGGLSELDKAGFIKRQLVETRQITKHVAQILDSRMNTKYDENDKLIREVKVITLKSK
LVSDFRKDFQFYKVREINNYHHAHDAYLNAVVGTALIKKYPKLESEFVYGDYKVYDVRKM
IAKSEQEIGKATAKYFFYSNIMNFFKTEITLANGEIRKRPLIETNGETGEIVWDKGRDFA
TVRKVLSMPQVNIVKKTEVQTGGFSKESILPKRNSDKLIARKKDWDPKKYGGFDSPTVAY
SVLVVAKVEKGKSKKLKSVKELLGITIMERSSFEKNPIDFLEAKGYKEVKKDLIIKLPKY
SLFELENGRKRMLASAGELQKGNELALPSKYVNFLYLASHYEKLKGSPEDNEQKQLFVEQ
HKHYLDEIIEQISEFSKRVILADANLDKVLSAYNKHRDKPIREQAENIIHLFTLTNLGAP
AAFKYFDTTIDRKRYTSTKEVLDATLIHQSITGLYETRIDLSQLGGD
(SEQ ID NO: 104)
Linker = (SGGSx2-bipartite SV40 NLS-SGGSx2):
SGGSSGGSKRTADGSEFESPKKKRKVSGGSSGGS (SEQ ID NO: 105)
Genscript codon optimized MMLV RT pentamutant
(D200N T306K W313F T330P L603W);
TLNIEDEYRLHETSKEPDVSLGSTWLSDFPQAWAETGGMGLAVRQAPLIIPLKATSTPVS
IKQYPMSQEARLGIKPHIQRLLDQGILVPCQSPWNTPLLPVKKPGTNDYRPVQDLREVNK
RVEDIHPTVPNPYNLLSGLPPSHQWYTVLDLKDAFFCLRLHPTSQPLFAFEWRDPEMGIS
GQLTWTRLPQGFKNSPTLFNEALHRDLADFRIQHPDLILLQYVDDLLLAATSELDCQQGT
RALLQTLGNLGYRASAKKAQICQKQVKYLGYLLKEGQRWLTEARKETVMGQPTPKTPRQL
REFLGKAGFCRLFIPGFAEMAAPLYPLTKPGTLFNWGPDQQKAYQEIKQALLTAPALGLP
DLTKPFELFVDEKQGYAKGVLTQKLGPWRRPVAYLSKKLDPVAAGWPPCLRMVAAIAVLT
KDAGKLTMGQPLVILAPHAVEALVKQPPDRWLSNARMTHYQALLLDTDRVQFGPVVALNP
ATLLPLPEEGLQHNCLDILAEAHGTRPDLTDQPLPDADHTWYTDGSSLLQEGQRKAGAAV
TTETEVIWAKALPAGTSAQRAELIALTQALKMAEGKKLNVYTDSRYAFATAHIHGEIYRR
RGWLTSEGKEIKNKDEILALLKALFLPKRLSIIHCPGHQKGHSAEARGNRMADQAARKAA
ITETPDTSTLLIENSSP (SEQ ID NO: 98)
Other linker sequences:
SGGS (SEQ ID NO: 122)
Bipartite SV40 NLS:
KRTADGSEFESPKKKRKV (SEQ ID NO: 140)
Other linker sequences:
GSG (SEQ ID NO: 122)
c-Myc NLS:
PAAKRVKLD (SEQ ID NO: 135)

[0554] The modified fusion proteins may comprise any suitable structural configuration. For example, the fusion protein may comprise from the N-terminal to the C-terminal direction, a napDNAbp fused to a polymerase (e.g., a DNA-dependent DNA polymerase or an RNA-dependent DNA polymerase, such as a reverse transcriptase). In other embodiments, the fusion protein may comprise from the N-terminal to the C-terminal direction, a polymerase (e.g., a reverse transcriptase) fused to a napDNAbp. The fused domain may optionally be joined by a linker, e.g., an amino acid sequence. In other embodiments, the fusion proteins may comprise the structure NH₂-[napDNAbp]-[polymerase]-COOH; or NH₂-[polymerase]-[napDNAbp]-COOH, wherein each instance of “]-[” indicates the presence of an optional linker sequence. In embodiments wherein the polymerase is a reverse transcriptase, the fusion proteins may comprise the structure NH₂-[napDNAbp]-[RT]-COOH; or NH₂-[RT]-[napDNAbp]-COOH, wherein each instance of “]-[” indicates the presence of an optional linker sequence.

[0555] In various embodiments, the prime editor fusion proteins utilized in the methods and compositions contemplated herein may also include any variants of the above-disclosed sequences having an amino acid sequence that is at least about 70% identical, at least about 80% identical, at least about 90% identical, at least about 95% identical, at least about 96% identical, at least about 97% identical, at least about 98% identical, at least about 99% identical, at least about 99.5% identical, or at least about 99.9% identical to PEmax.

[0556] In certain embodiments, linkers may be used to link any of the peptides or peptide domains or moieties of the invention (e.g., a napDNAbp linked or fused to a reverse transcriptase).

[0557] The present disclosure contemplates the modification of any Cas9 protein known in the art with one or more of the PEmax mutations described herein (i.e., R221K, N394K, and/or H840A) and the combination of any modified Cas9 protein with one or more of the PEmax architecture features described herein (e.g., the optimized MMLV RT pentamutant, NLS's, linkers, etc.).

[0558] In some embodiments, the PEmax proteins described herein include any of the following other Cas9 sequences disclosed herein, or variants thereof, which may be further modified with one or more of the mutations described herein at corresponding amino acid positions. The napDNAbp used in the PEmax constructs described herein may include any suitable homologs and/or orthologs or naturally occurring enzymes, such as Cas9, Cas9 homologs and/or orthologs have been described in various species, including, but not limited to, S. pyogenes and S. thermophilus. The Cas moiety may be configured (e.g., mutagenized, recombinantly engineered, or otherwise obtained from nature) as a nickase, i.e., capable of cleaving only a single strand of the target double-stranded DNA. Additional suitable Cas9 nucleases and sequences will be apparent to those of skill in the art based on this disclosure, and such Cas9 nucleases and sequences include Cas9 sequences from the organisms and loci disclosed in Chylinski, Rhun, and Charpentier, “The tracrRNA and Cas9 families of type II CRISPR-Cas immunity systems” (2013) RNA Biology 10:5, 726-737; the entire contents of which are incorporated herein by reference. In some embodiments, a Cas9 nuclease has an inactive (e.g., an inactivated) DNA cleavage domain; that is, the Cas9 is a nickase. In some embodiments, the Cas9 protein comprises an amino acid sequence that is at least 85%, at least 90%, at least 92%, at least 95%, at least 96%, at least 97%, at least 98%, at least 99%, or at least 99.5% identical to the amino acid sequence of a Cas9 protein as provided by any one of the Cas9 orthologs provided herein.

### Prime Editor-MMR Inhibitor Fusion Proteins

[0559] The present disclosure contemplates that in some embodiments, the MMR inhibitor (e.g., an antibody or polypeptide inhibitor of an MMR protein, such as an MLH1 dominant negative variant that inhibits MMR) may be linked to a prime editor fusion protein or at least one of the components thereof.

[0560] In certain embodiments, the inhibitor domains described herein, e.g., an anti-MLH1 antibody, or an MLH1 dominant negative variant, may also be provided in cis by fusing the domain to the prime editor domain. Any of the following structures are contemplated, wherein “]-[” denotes an optional linker:
[0561] [napDNAbp]-[reverse transcriptase]-[MLH1 inhibitor];
[0562] [reverse transcriptase]-[napDNAbp]-[MLH1 inhibitor];
[0563] [MLH1 inhibitor]-[reverse transcriptase]-[napDNAbp];
[0564] [MLH1 inhibitor]-[napDNAbp]-[reverse transcriptase];
[0565] [napDNAbp]-[MLH1 inhibitor]-[reverse transcriptase]; or
[0566] [reverse transcriptase]-[MLH1 inhibitor]-[napDNAbp].

[0567] In certain embodiments, the inhibitor domain is an MLH1 dominant negative variant. Any of the following structures are contemplated, wherein “]-[” denotes an optional linker:
[0568] [napDNAbp]-[reverse transcriptase]-[MLH1 dominant negative variant];
[0569] [reverse transcriptase]-[napDNAbp]-[MLH1 dominant negative variant];
[0570] [MLH1 dominant negative variant]-[reverse transcriptase]-[napDNAbp];
[0571] [MLH1 dominant negative variant]-[napDNAbp]-[reverse transcriptase];
[0572] [napDNAbp]-[MLH1 dominant negative variant]-[reverse transcriptase]: or
[0573] [reverse transcriptase]-[MLH1 dominant negative variant]-[napDNAbp].

[0574] In certain other embodiments, the inhibitor domains described herein, e.g., an anti-MMR protein antibody, or an MMR protein dominant negative variant, may also be provided in cis by fusing the domain to the prime editor domain. Any of the following structures are contemplated, wherein “]-[” denotes an optional linker:
[0575] [napDNAbp]-[reverse transcriptase]-[anti-MMR protein inhibitor];
[0576] [reverse transcriptase]-[napDNAbp]-[anti-MMR protein inhibitor];
[0577] [anti-MMR protein inhibitor]-[reverse transcriptase]-[napDNAbp];
[0578] [anti-MMR protein inhibitor]-[napDNAbp]-[reverse transcriptase];
[0579] [napDNAbp]-[anti-MMR protein inhibitor]-[reverse transcriptase]; or
[0580] [reverse transcriptase]-[anti-MMR protein inhibitor]-[napDNAbp], wherein the MMR protein is any one of MLH1, PMS2 (or MutL alpha), PMS1 (or MutL beta). MLH3 (or MutL gamma), MutS alpha (MSH2-MSH6), MutS beta (MSH2-MSH3). MSH2, MSH6, PCNA, RFC, EXO1, POLδ, and PCNA.

[0581] In certain embodiments, the inhibitor domain is a dominant negative variant of any MMR protein, such as MLH1, PMS2 (or MutL alpha), PMS1 (or MutL beta), MLH3 (or MutL gamma), MutS alpha (MSH2-MSH6), MutS beta (MSH2-MSH3). MSH2, MSH6, PCNA, RFC, EXO1, POLδ, and PCNA. Any of the following structures are contemplated, wherein “]-[” denotes an optional linker:
[0582] [napDNAbp]-[reverse transcriptase]-[dominant negative variant of any MMR protein];
[0583] [reverse transcriptase]-[napDNAbp]-[dominant negative variant of any MMR protein];
[0584] [dominant negative variant of any MMR protein]-[reverse transcriptase]-[napDNAbp];
[0585] [dominant negative variant of any MMR protein napDNAbp]-[reverse transcriptase];
[0586] [napDNAbp]-[dominant negative variant of any MMR protein]-[reverse transcriptase]; or [reverse transcriptase]-[dominant negative variant of any MMR protein]-[napDNAbp].

[0587] In addition, the MMR inhibitor may be fused to only one of the domains of a prime editor and administered separate from the other prime editor domain. For example, the MMR inhibitor may be fused to the napDNAbp domain, whereby the polymerase domain is provided separately in trans. In another, the MMR inhibitor may be fused to the polymerase domain, whereby the napDNAbp domain is provided separately in trans.

### A. Linkers

[0588] As defined above, the term “linker,” as used herein, refers to a chemical group or a molecule linking two molecules or moieties. e.g., a binding domain and a cleavage domain of a nuclease. In some embodiments, a linker joins a gRNA binding domain of an RNA-programmable nuclease and the catalytic domain of a polymerase (e.g., a reverse transcriptase). In some embodiments, a linker joins a dCas9 and reverse transcriptase. Typically, the linker is positioned between, or flanked by, two groups, molecules, or other moieties and connected to each one via a covalent bond, thus connecting the two. In some embodiments, the linker is an amino acid or a plurality of amino acids (e.g., a peptide or protein). In some embodiments, the linker is an organic molecule, group, polymer, or chemical moiety. In some embodiments, the linker is 5-100 amino acids in length, for example, 5, 6, 7, 8, 9, 10, 11, 12, 13, 14, 15, 16, 17, 18, 19, 20, 21, 22, 23, 24, 25, 26, 27, 28, 29, 30, 30-35, 35-40, 40-45, 45-50, 50-60, 60-70, 70-80, 80-90, 90-100, 100-150, or 150-200 amino acids in length. Longer or shorter linkers are also contemplated.

[0589] The linker may be as simple as a covalent bond, or it may be a polymeric linker many atoms in length. In certain embodiments, the linker is a polypeptide or based on amino acids. In other embodiments, the linker is not peptide-like. In certain embodiments, the linker is a covalent bond (e.g., a carbon-carbon bond, disulfide bond, carbon-heteroatom bond, etc.). In certain embodiments, the linker is a carbon-nitrogen bond of an amide linkage. In certain embodiments, the linker is a cyclic or acyclic, substituted or unsubstituted, branched or unbranched aliphatic or heteroaliphatic linker. In certain embodiments, the linker is polymeric (e.g., polyethylene, polyethylene glycol, polyamide, polyester, etc.). In certain embodiments, the linker comprises a monomer, dimer, or polymer of aminoalkanoic acid. In certain embodiments, the linker comprises an aminoalkanoic acid (e.g., glycine, ethanoic acid, alanine, beta-alanine, 3-aminopropanoic acid. 4-aminobutanoic acid, 5-pentanoic acid, etc.). In certain embodiments, the linker comprises a monomer, dimer, or polymer of aminohexanoic acid (Ahx). In certain embodiments, the linker is based on a carbocyclic moiety (e.g., cyclopentane, cyclohexane). In other embodiments, the linker comprises a polyethylene glycol moiety (PEG). In other embodiments, the linker comprises amino acids. In certain embodiments, the linker comprises a peptide. In certain embodiments, the linker comprises an aryl or heteroaryl moiety. In certain embodiments, the linker is based on a phenyl ring. The linker may include functionalized moieties to facilitate attachment of a nucleophile (e.g., thiol, amino) from the peptide to the linker. Any electrophile may be used as part of the linker. Exemplary electrophiles include, but are not limited to, activated esters, activated amides, Michael acceptors, alkyl halides, aryl halides, acyl halides, and isothiocyanates.

[0590] In some other embodiments, the linker comprises the amino acid sequence (GGGGS)ₙ (SEQ ID NO: 118), (G)ₙ(SEQ ID NO: 119), (EAAAK)ₙ (SEQ ID NO: 120), (GGS)ₙ(SEQ ID NO: 121), (SGGS)ₙ (SEQ ID NO: 122), (XP)ₙ(SEQ ID NO: 123), or any combination thereof, wherein n is independently an integer between 1 and 30, and wherein X is any amino acid. In some embodiments, the linker comprises the amino acid sequence (GGS)n (SEQ ID NO: 121), wherein n is 1, 3, or 7. In some embodiments, the linker comprises the amino acid sequence SGSETPGTSESATPES (SEQ ID NO: 124), also referred to as XTEN. In some embodiments, the linker comprises the amino acid sequence SGGSSGGSSGSETPGTSESATPESSGGSSGGS (SEQ ID NO: 125). In some embodiments, the linker comprises the amino acid sequence SGGSGGSGGS (SEQ ID NO: 126). In some embodiments, the linker comprises the amino acid sequence SGGS (SEQ ID NO: 127). In other embodiments, the linker comprises the amino acid sequence SGGSSGGSSGSETPGTSESATPESAGSYPYDVPDYAGSAAPAAKKKKLDGSGSGGSSGGS (SEQ ID NO: 128, 60AA).

[0591] In certain embodiments, linkers may be used to link any of the peptides or peptide domains or moieties of the invention (e.g., a napDNAbp linked or fused to a reverse transcriptase).

[0592] As defined above, the term “linker,” as used herein, refers to a chemical group or a molecule linking two molecules or moieties, e.g., a binding domain and a cleavage domain of a nuclease. In some embodiments, a linker joins a gRNA binding domain of an RNA-programmable nuclease and the catalytic domain of a recombinase. In some embodiments, a linker joins a dCas9 and reverse transcriptase. Typically, the linker is positioned between, or flanked by, two groups, molecules, or other moieties and connected to each one via a covalent bond, thus connecting the two. In some embodiments, the linker is an amino acid or a plurality of amino acids (e.g., a peptide or protein). In some embodiments, the linker is an organic molecule, group, polymer, or chemical moiety. In some embodiments, the linker is 5-100 amino acids in length, for example, 5, 6, 7, 8, 9, 10, 11, 12, 13, 14, 15, 16, 17, 18, 19, 20, 21, 22, 23, 24, 25, 26, 27, 28, 29, 30, 30-35, 35-40, 40-45, 45-50, 50-60, 60-70, 70-80, 80-90, 90-100, 100-150, or 150-200 amino acids in length. Longer or shorter linkers are also contemplated.

[0593] The linker may be as simple as a covalent bond, or it may be a polymeric linker many atoms in length. In certain embodiments, the linker is a polypeptide or based on amino acids. In other embodiments, the linker is not peptide-like. In certain embodiments, the linker is a covalent bond (e.g., a carbon-carbon bond, disulfide bond, carbon-heteroatom bond, etc.). In certain embodiments, the linker is a carbon-nitrogen bond of an amide linkage. In certain embodiments, the linker is a cyclic or acyclic, substituted or unsubstituted, branched or unbranched aliphatic or heteroaliphatic linker. In certain embodiments, the linker is polymeric (e.g., polyethylene, polyethylene glycol, polyamide, polyester, etc.). In certain embodiments, the linker comprises a monomer, dimer, or polymer of aminoalkanoic acid. In certain embodiments, the linker comprises an aminoalkanoic acid (e.g., glycine, ethanoic acid, alanine, beta-alanine, 3-aminopropanoic acid, 4-aminobutanoic acid, 5-pentanoic acid, etc.). In certain embodiments, the linker comprises a monomer, dimer, or polymer of aminoHEXAnoic acid (Ahx). In certain embodiments, the linker is based on a carbocyclic moiety (e.g., cyclopentane, cycloHEXAne). In other embodiments, the linker comprises a polyethylene glycol moiety (PEG). In other embodiments, the linker comprises amino acids. In certain embodiments, the linker comprises a peptide. In certain embodiments, the linker comprises an aryl or heteroaryl moiety. In certain embodiments, the linker is based on a phenyl ring. The linker may include functionalized moieties to facilitate attachment of a nucleophile (e.g., thiol, amino) from the peptide to the linker. Any electrophile may be used as part of the linker. Exemplary electrophiles include, but are not limited to, activated esters, activated amides, Michael acceptors, alkyl halides, aryl halides, acyl halides, and isothiocyanates.

[0594] In some other embodiments, the linker comprises the amino acid sequence (GGGGS)n (SEQ ID NO: 118), (G)n (SEQ ID NO: 119), (EAAAK)ₙ(SEQ ID NO: 120), (GGS)ₙ (SEQ ID NO: 121), (SGGS)n (SEQ ID NO: 122), (XP)n (SEQ ID NO: 123), or any combination thereof, wherein n is independently an integer between 1 and 30, and wherein X is any amino acid. In some embodiments, the linker comprises the amino acid sequence (GGS)n (SEQ ID NO: 121), wherein n is 1, 3, or 7. In some embodiments, the linker comprises the amino acid sequence SGSETPGTSESATPES (SEQ ID NO: 124), also referred to as XTEN. In some embodiments, the linker comprises the amino acid sequence SGGSSGGSSGSETPGTSESATPESSGGSSGGS (SEQ ID NO: 125). In some embodiments, the linker comprises the amino acid sequence SGGSGGSGGS (SEQ ID NO: 126). In some embodiments, the linker comprises the amino acid sequence SGGS (SEQ ID NO: 127).

[0595] In particular, the following linkers can be used in various embodiments to join prime editor domains with one another: GGS (SEQ ID NO: 129); GGSGGS (SEQ ID NO: 130); GGSGGSGGS (SEQ ID NO: 131); SGGSSGGSSGSETPGTSESATPESSGGSSGGSS (SEQ ID NO: 102); SGSETPGTSESATPES (SEQ ID NO: 124), also referred to as XTEN; SGGSSGGSSGSETPGTSESATPESAGSYPYDVPDYAGSAAPAAKKKKLDGSGSGGSSGGS (SEQ ID NO: 128).

[0596] The PE fusion proteins may also comprise various other domains besides the napDNAbp (e.g., Cas9 domain) and the polymerase domain (e.g., RT domain). For example, in the case where the napDNAbp is a Cas9 and the polymerase is a RT, the PE fusion proteins may comprise one or more linkers that join the Cas9 domain with the RT domain. The linkers may also join other functional domains, such as nuclear localization sequences (NLS) or a FEN1 (or other flap endonuclease) to the PE fusion proteins or a domain thereof.

[0597] In some embodiments, the PE fusion proteins may comprise an inhibitor of the DNA mismatch repair pathway (e.g., MLH1dn as described herein). In certain embodiments, a PE fusion protein and an inhibitor of the DNA mismatch repair pathway are fused via a linker. In some embodiments, the linker is a self-hydrolyzing linker. Suitable self-hydrolyzing linkers include, but are not limited to, amino acid sequences comprising 2A self-cleaving peptides. 2A self-cleaving peptides are capable of inducing ribosomal skipping during protein translation, resulting in the failure of the ribosome to make a peptide bond between two genes, or two gene fragments. Exemplary 2A self-cleaving peptides that may be used as linkers in the fusion proteins described herein include the amino acid sequences:

T2A-
(SEQ ID NO: 233)
EGRGSLLTCGDVEENPGP
P2A-
(SEQ ID NO: 234)
ATNFSLLKQAGDVEENPGP
E2A-
(SEQ ID NO: 235)
QCTNYALLKLAGDVESNPGP
F2A-
(SEQ ID NO: 236)
VKQTLNFDLLKLAGDVESNPGP

[0598] In certain embodiments, the PE fusion proteins described herein are fused to MLH1dn by a linker comprising the amino acid sequence of SEQ ID NO: 234.

### B. Nuclear Localization Sequence (NLS)

[0599] In various embodiments, the PE fusion proteins may comprise one or more nuclear localization sequences (NLS), which help promote translocation of a protein into the cell nucleus. Such sequences are well-known in the art and can include the examples represented by SEQ ID NOs: 1, 101, 103, 133-139.

[0600] The NLS examples above are non-limiting. The PE fusion proteins may comprise any known NLS sequence, including any of those described in Cokol et al., “Finding nuclear localization signals,” EMBO Rep., 2000, 1(5): 411-415 and Freitas et al., “Mechanisms and Signals for the Nuclear Import of Proteins,” Current Genomics, 2009, 10(8): 550-7, each of which are incorporated herein by reference.

[0601] In various embodiments, the prime editors and constructs encoding the prime editors utilized in the methods and compositions disclosed herein further comprise one or more, preferably, at least two nuclear localization signals. In certain embodiments, the prime editors comprise at least two NLSs. In embodiments with at least two NLSs, the NLSs can be the same NLSs or they can be different NLSs. In addition, the NLSs may be expressed as part of a fusion protein with the remaining portions of the prime editors. In some embodiments, one or more of the NLSs are bipartite NLSs (“bpNLS”). In certain embodiments, the disclosed fusion proteins comprise two bipartite NLSs. In some embodiments, the disclosed fusion proteins comprise more than two bipartite NLSs.

[0602] The location of the NLS fusion can be at the N-terminus, the C-terminus, or within a sequence of a prime editor (e.g., inserted between the encoded napDNAbp component (e.g., Cas9) and a polymerase domain (e.g., a reverse transcriptase domain).

[0603] The NLSs may be any known NLS sequence in the art. The NLSs may also be any future-discovered NLSs for nuclear localization. The NLSs also may be any naturally-occurring NLS, or any non-naturally occurring NLS (e.g., an NLS with one or more desired mutations). The term “nuclear localization sequence” or “NLS” refers to an amino acid sequence that promotes import of a protein into the cell nucleus, for example, by nuclear transport. Nuclear localization sequences are known in the art and would be apparent to the skilled artisan. For example, NLS sequences are described in Plank et al., International PCT application PCT/EP2000/011690, filed Nov. 23, 2000, published as WO/2001/038547 on May 31, 2001, the contents of which are incorporated herein by reference. In some embodiments, an NLS comprises the amino acid sequence PKKKRKV (SEQ ID NO: 132), MDSLLMNRRKFLYQFKNVRWAKGRRETYLC (SEQ ID NO: 1), KRTADGSEFESPKKKRKV (SEQ ID NO: 140), or KRTADGSEFEPKKKRKV (SEQ ID NO: 141). In other embodiments. NLS comprises the amino acid sequences NLSKRPAAIKKAGQAKKKK (SEQ ID NO: 142), PAAKRVKLD (SEQ ID NO: 135), RQRRNELKRSF (SEQ ID NO: 143), NQSSNFGPMKGGNFGGRSSGPYGGGGQYFAKPRNQGGY (SEQ ID NO: 144).

[0604] In one aspect of the disclosure, a prime editor may be modified with one or more nuclear localization signals (NLS), preferably at least two NLSs. In certain embodiments, the prime editors are modified with two or more NLSs. The disclosure contemplates the use of any nuclear localization signal known in the art at the time of the disclosure, or any nuclear localization signal that is identified or otherwise made available in the state of the art after the time of the instant filing. A representative nuclear localization signal is a peptide sequence that directs the protein to the nucleus of the cell in which the sequence is expressed. A nuclear localization signal is predominantly basic, can be positioned almost anywhere in a protein's amino acid sequence, generally comprises a short sequence of four amino acids (Autieri & Agrawal, (1998) J. Biol. Chem. 273: 14731-37, incorporated herein by reference) to eight amino acids, and is typically rich in lysine and arginine residues (Magin et al., (2000) Virology 274: 11-16, incorporated herein by reference). Nuclear localization signals often comprise proline residues. A variety of nuclear localization signals have been identified and have been used to effect transport of biological molecules from the cytoplasm to the nucleus of a cell. See, e.g., Tinland et al., (1992) Proc. Natl. Acad. Sci. U.S.A. 89:7442-46; Moede et al., (1999) FEBS Lett. 461:229-34, which is incorporated by reference. Translocation is currently thought to involve nuclear pore proteins.

[0605] Most NLSs can be classified in three general groups: (i) a monopartite NLS exemplified by the SV40 large T antigen NLS (PKKKRKV (SEQ ID NO: 132)); (ii) a bipartite motif consisting of two basic domains separated by a variable number of spacer amino acids and exemplified by the Xenopus nucleoplasmin NLS (KRXXXXXXXXXXKKKK (SEQ ID NO: 145)); and (iii) noncanonical sequences such as M9 of the hnRNP A1 protein, the influenza virus nucleoprotein NLS, and the yeast Gal4 protein NLS (Dingwall and Laskey 1991). Nuclear localization signals appear at various points in the amino acid sequences of proteins. NLS's have been identified at the N-terminus, the C-terminus and in the central region of proteins. Thus, the disclosure provides prime editors that may be modified with one or more NLSs at the C-terminus, the N-terminus, as well as at in internal region of the prime editor. The residues of a longer sequence that do not function as component NLS residues should be selected so as not to interfere, for example tonically or sterically, with the nuclear localization signal itself. Therefore, although there are no strict limits on the composition of an NLS-comprising sequence, in practice, such a sequence can be functionally limited in length and composition.

[0606] The present disclosure contemplates any suitable means by which to modify a prime editor to include one or more NLSs. In one aspect, the prime editors may be engineered to express a prime editor protein that is translationally fused at its N-terminus or its C-terminus (or both) to one or more NLSs, i.e., to form a prime editor-NLS fusion construct. In other embodiments, the prime editor-encoding nucleotide sequence may be genetically modified to incorporate a reading frame that encodes one or more NLSs in an internal region of the encoded prime editor. In addition, the NLSs may include various amino acid linkers or spacer regions encoded between the prime editor and the N-terminally, C-terminally, or internally-attached NLS amino acid sequence, e.g., and in the central region of proteins. Thus, the present disclosure also provides for nucleotide constructs, vectors, and host cells for expressing fusion proteins that comprise a prime editor and one or more NLSs.

[0607] The prime editors utilized in the methods and compositions described herein may also comprise nuclear localization signals which are linked to a prime editor through one or more linkers, e.g., and polymeric, amino acid, nucleic acid, polysaccharide, chemical, or nucleic acid linker element. The linkers within the contemplated scope of the disclosure are not intended to have any limitations and can be any suitable type of molecule (e.g., polymer, amino acid, polysaccharide, nucleic acid, lipid, or any synthetic chemical linker domain) and be joined to the prime editor by any suitable strategy that effectuates forming a bond (e.g., covalent linkage, hydrogen bonding) between the prime editor and the one or more NLSs.

### C. Flap Endonucleases (e.g., FEN1)

[0608] In various embodiments, the PE fusion proteins may comprise one or more flap endonucleases (e.g., FEN1), which refers to an enzyme that catalyzes the removal of 5′ single strand DNA flaps. These are enzymes that process the removal of 5′ flaps formed during cellular processes, including DNA replication. The prime editing utilized in the methods and compositions described herein may utilize endogenously supplied flap endonucleases or those provided in trans to remove the 5′ flap of endogenous DNA formed at the target site during prime editing. Flap endonucleases are known in the art and can be found described in Patel et al., “Flap endonucleases pass 5′-flaps through a flexible arch using a disorder-thread-order mechanism to confer specificity for free 5′-ends,” Nucleic Acids Research, 2012, 40(10): 4507-4519 and Tsutakawa et al., “Human flap endonuclease structures, DNA double-base flipping, and a unified understanding of the FEN1 superfamily,” Cell. 2011, 145(2): 198-211 (each of which are incorporated herein by reference). An exemplary flap endonuclease is FEN1, which can be represented by the following amino acid sequence:

| | | SEQ |
|---|---|---|
| Description | Sequence | ID NO: |
| FEN1 | MGIQGLAKLIADVAPSAIRENDIKSY | 146 |
| Wild type | FGRKVAIDASMSIYQFLIAVRQGGDV | |
| (wt) | LQNEEGETTSHLMGMFYRTIRMMENG | |
| | IKPVYVFDGKPPQLKSGELAKRSERR | |
| | AEAEKQLQQAQAAGAEQEVEKFTKRL | |
| | VKVTKQHNDECKHLLSLMGIPYLDAP | |
| | SEAEASCAALVKAGKVYAAATEDMDC | |
| | LTFGSPVLMRHLTASEAKKLPIQEFH | |
| | LSRILQELGLNQEQFVDLCILLGSDY | |
| | CESIRGIGPKRAVDLIQKHKSIEEIV | |
| | RRLDPNKYPVPENWLHKEAHQLFLEP | |
| | EVLDPESVELKWSEPNEEELIKFMCG | |
| | EKQFSEERIRSGVKRLSKSRQGSTQG | |
| | RLDDFFKVTGSLSSAKRKEPEPKGST | |
| | KKKAKTGAAGKFKRGK | |

[0609] The flap endonucleases may also include any FEN 1 variant, mutant, or other flap endonuclease ortholog, homolog, or variant. Non-limiting FEN 1 variant examples are as follows:

| | | SEQ |
|---|---|---|
| Description | Sequence | ID NO: |
| FEN1 | MGIQGLAKLIADVAPSAIRENDIKSYFGRKVAIDASMSIYQFLIAVRQGGDVLQ | 147 |
| K168R (relative | NEEGETTSHLMGMFYRTIRMMENGIKPVYVFDGKPPQLKSGELAKRSERRAEAE | |
| to FEN1 wt) | KQLQQAQAAGAEQEVEKFTKRLVKVTKQHNDECKHLLSLMGIPYLDAPSEAEAS | |
| | CAALVRAGKVYAAATEDMDCLTFGSPVLMRHLTASEAKKLPIQEFHLSRILQEL | |
| | GLNQEQFVDLCILLGSDYCESIRGIGPKRAVDLIQKHKSIEEIVRRLDPNKYPV | |
| | PENWLHKEAHQLFLEPEVLDPESVELKWSEPNEEELIKFMCGEKQFSEERIRSG | |
| | VKRLSKSRQGSTQGRLDDFFKVTGSLSSAKRKEPEPKGSTKKKAKTGAAGKFKR | |
| | GK | |
| FEN1 | MGIQGLAKLIADVAPSAIRENDIKSYFGRKVAIDASMSIYQFLIAVRQGGDVLQ | 148 |
| S187A (relative | NEEGETTSHLMGMFYRTIRMMENGIKPVYVEDGKPPQLKSGELAKRSERRAEAE | |
| to FENI wt) | KQLQQAQAAGAEQEVEKFTKRLVKVTKQHNDECKHLLSLMGIPYLDAPSEAEAS | |
| | CAALVKAGKVYAAATEDMDCLTFGAPVLMRHLTASEAKKLPIQEFHLSRILQEL | |
| | GLNQEQFVDLCILLGSDYCESIRGIGPKRAVDLIQKHKSIEEIVRRLDPNKYPV | |
| | PENWLHKEAHQLFLEPEVLDPESVELKWSEPNEEELIKFMCGEKQFSEERIRSG | |
| | VKRLSKSRQGSTQGRLDDFFKVTGSLSSAKRKEPEPKGSTKKKAKTGAAGKFKR | |
| | GK | |
| FEN1 | MGIQGLAKLIADVAPSAIRENDIKSYFGRKVAIDASMSIYQFLIAVRQGGDVLQ | 149 |
| K354R (relative | NEEGETTSHLMGMFYRTIRMMENGIKPVYVFDGKPPQLKSGELAKRSERRAEAE | |
| to FEN1 wt) | KQLQQAQAAGAEQEVEKFTKRLVKVTKQHNDECKHLLSLMGIPYLDAPSEAEAS | |
| | CAALVKAGKVYAAATEDMDCLTFGSPVLMRHLTASEAKKLPIQEFHLSRILQEL | |
| | GLNQEQFVDLCILLGSDYCESIRGIGPKRAVDLIQKHKSIEEIVRRLDPNKYPV | |
| | PENWLHKEAHQLFLEPEVLDPESVELKWSEPNEEELIKFMCGEKQFSEERIRSG | |
| | VKRLSKSRQGSTQGRLDDFFKVTGSLSSARRKEPEPKGSTKKKAKTGAAGKFKR | |
| | GK | |
| GEN1 | MGVNDLWQILEPVKQHIPLRNLGGKTIAVDLSLWVCEAQTVKKMMGSVMKPHLR | 150 |
| | NLFFRISYLTQMDVKLVFVMEGEPPKLKADVISKRNQSRYGSSGKSWSQKTGRS | |
| | HFKSVLRECLHMLECLGIPWVQAAGEAEAMCAYLNAGGHVDGCLTNDGDTFLYG | |
| | AQTVYRNFTMNTKDPHVDCYTMSSIKSKLGLDRDALVGLAILLGCDYLPKGVPG | |
| | VGKEQALKLIQILKGQSLLQRFNRWNETSCNSSPQLLVTKKLAHCSVCSHPGSP | |
| | KDHERNGCRLCKSDKYCEPHDYEYCCPCEWHRTEHDRQLSEVENNIKKKACCCE | |
| | GFPFHEVIQEFLLNKDKLVKVIRYQRPDLLLFQRFTLEKMEWPNHYACEKLLVL | |
| | LTHYDMIERKLGSRNSNQLQPIRIVKTRIRNGVHCFEIEWEKPEHYAMEDKQHG | |
| | EFALLTIEEESLFEAAYPEIVAVYQKQKLEIKGKKQKRIKPKENNLPEPDEVMS | |
| | FQSHMTLKPTCEIFHKQNSKLNSGISPDPTLPQESISASLNSLLLPKNTPCLNA | |
| | QEQFMSSLRPLAIQQIKAVSKSLISESSQPNTSSHNISVIADLHLSTIDWEGTS | |
| | FSNSPAIQRNTFSHDLKSEVESELSAIPDGFENIPEQLSCESERYTANIKKVLD | |
| | EDSDGISPEEHLLSGITDLCLQDLPLKERIFTKLSYPQDNLQPDVNLKTLSILS | |
| | VKESCIANSGSDCTSHLSKDLPGIPLQNESRDSKILKGDQLLQEDYKVNTSVPY | |
| | SVSNTVVKTCNVRPPNTALDHSRKVDMQTTRKILMKKSVCLDRHSSDEQSAPVF | |
| | GKAKYTTQRMKHSSQKHNSSHFKESGHNKLSSPKIHIKETEQCVRSYETAENEE | |
| | SCFPDSTKSSLSSLQCHKKENNSGTCLDSPLPLRQRLKLRFQST | |
| ERCC5 | MGVQGLWKLLECSGRQVSPEALEGKILAVDISIWLNQALKGVRDRHGNSIENPH | 151 |
| | LLTLFHRLCKLLFFRIRPIFVFDGDAPLLKKQTLVKRRQRKDLASSDSRKTTEK | |
| | LLKTFLKRQAIKTAFRSKRDEALPSLTQVRRENDLYVLPPLQEEEKHSSEEEDE | |
| | KEWQERMNQKQALQEEFFHNPQAIDIESEDFSSLPPEVKHEILTDMKEFTKRRR | |
| | TLFEAMPEESDDFSQYQLKGLLKKNYLNQHIEHVQKEMNQQHSGHIRRQYEDEG | |
| | GFLKEVESRRVVSEDTSHYILIKGIQAKTVAEVDSESLPSSSKMHGMSFDVKSS | |
| | PCEKLKTEKEPDATPPSPRTLLAMQAALLGSSSEEELESENRRQARGRNAPAAV | |
| | DEGSISPRTLSAIKRALDDDEDVKVCAGDDVQTGGPGAEEMRINSSTENSDEGL | |
| | KVRDGKGIPFTATLASSSVNSAEEHVASTNEGREPTDSVPKEQMSLVHVGTEAF | |
| | PISDESMIKDRKDRLPLESAVVRHSDAPGLPNGRELTPASPTCTNSVSKNETHA | |
| | EVLEQQNELCPYESKFDSSLLSSDDETKCKPNSASEVIGPVSLQETSSIVSVPS | |
| | EAVDNVENVVSFNAKEHENFLETIQEQQTTESAGQDLISIPKAVEPMEIDSEES | |
| | ESDGSFIEVQSVISDEELQAEFPETSKPPSEQGEEELVGTREGEAPAESESLLR | |
| | DNSERDDVDGEPQEAEKDAEDSLHEWQDINLEELETLESNLLAQQNSLKAQKQQ | |
| | QERIAATVTGQMFLESQELLRLFGIPYIQAPMEAEAQCAILDLTDQTSGTITDD | |
| | SDIWLFGARHVYRNFFNKNKFVEYYQYVDFHNQLGLDRNKLINLAYLLGSDYTE | |
| | GIPTVGCVTAMEILNEFPGHGLEPLLKFSEWWHEAQKNPKIRPNPHDTKVKKKL | |
| | RTLQLTPGFPNPAVAEAYLKPVVDDSKGSFLWGKPDLDKIREFCQRYFGWNRTK | |
| | TDESLFPVLKQLDAQQTQLRIDSFFRLAQQEKEDAKRIKSQRLNRAVTCMLRKE | |
| | KEAAASEIEAVSVAMEKEFELLDKAKRKTQKRGITNTLEESSSLKRKRLSDSKR | |
| | KNTCGGFLGETCLSESSDGSSSEDAESSSLMNVQRRTAAKEPKTSASDSQNSVK | |
| | EAPVKNGGATTSSSSDSDDDGGKEKMVLVTARSVFGKKRRKLRRARGRKRKT | |

[0610] In various embodiments, the prime editor fusion proteins utilized in the methods and compositions contemplated herein may include any flap endonuclease variant of the above-disclosed sequences having an amino acid sequence that is at least about 70% identical, at least about 80% identical, at least about 90% identical, at least about 95% identical, at least about 96% identical, at least about 97% identical, at least about 98% identical, at least about 99% identical, at least about 99.5% identical, or at least about 99.9% identical to any of the above sequences. Other endonucleases that may be utilized by the instant methods to facilitate removal of the 5′ end single strand DNA flap include, but are not limited to (1) trex 2, (2) exo1 endonuclease (e.g., Keijzers et al., Biosci Rep. 2015, 35(3): e00206)

### Trex 2

3′ three prime repair exonuclease 2 (TREX2)-
human [Accession No. NM_080701]
(SEQ ID NO: 152)
MSEAPRAETFVFLDLEATGLPSVEPEIAELSLFAVHRSSLENPEH
DESGALVLPRVLDKLTLCMCPERPFTAKASEITGLSSEGLARCRK
AGFDGAVVRTLQAFLSRQAGPICLVAHNGEDYDFPLLCAELRRLG
ARLPRDTVCLDTLPALRGLDRAHSHGTRARGRQGYSLGSLFHRYF
RAEPSAAHSAEGDVHTLLLIFLHRAAELLAWADEQARGWAHIEPM
YLPPDDPSLEA.
3′ three prime repair exonuclease 2 (TREX2)-
mouse [Accession No. NM_011907]
(SEQ ID NO: 153)
MSEPPRAETFVFLDLEATGLPNMDPEIAEISLFAVHRSSLENPER
DDSGSLVLPRVLDKLTLCMCPERPFTAKASEITGLSSESLMHCGK
AGENGAVVRTLQGFLSRQEGPICLVAHNGFDYDFPLLCTELQRLG
AHLPQDTVCLDTLPALRGLDRAHSHGTRAQGRKSYSLASLFHRYF
QAEPSAAHSAEGDVHTLLLIFLHRAPELLAWADEQARSWAHIEPM
YVPPDGPSLEA.
3′ three prime repair exonuclease 2 (TREX2)-rat
[Accession No. NM_001107580]
(SEQ ID NO: 154)
MSEPLRAETFVFLDLEATGLPNMDPEIAEISLFAVHRSSLENPER
DDSGSLVLPRVLDKLTLCMCPERPFTAKASEITGLSSEGLMNCRK
AAFNDAVVRTLQGFLSRQEGPICLVAHNGFDYDFPLLCTELQRLG
AHLPRDTVCLDTLPALRGLDRVHSHGTRAQGRKSYSLASLFHRYF
QAEPSAAHSAEGDVNTLLLIFLHRAPELLAWADEQARSWAHIEPM
YVPPDGPSLEA.

### ExoI

[0611] Human exonuclease 1 (EXO1) has been implicated in many different DNA metabolic processes, including DNA mismatch repair (MMR), micro-mediated end-joining, homologous recombination (HR), and replication. Human EXO1 belongs to a family of eukaryotic nucleases. Rad2/XPG, which also include FEN1 and GEN1. The Rad2/XPG family is conserved in the nuclease domain through species from phage to human. The EXO1 gene product exhibits both 5′ exonuclease and 5′ flap activity. Additionally, EXO1 contains an intrinsic 5′ RNase H activity. Human EXO1 has a high affinity for processing double stranded DNA (dsDNA), nicks, gaps, pseudo Y structures and can resolve Holliday junctions using its inherent flap activity. Human EXO1 is implicated in MMR and contain conserved binding domains interacting directly with MLH1 and MSH2. EXO1 nucleolytic activity is positively stimulated by PCNA, MutSα (MSH2/MSH6 complex), 14-3-3, MRN and 9-1-1 complex.

exonuclease 1 (EXO1) Accession No. NM_003686
(Homo sapiens exonuclease 1
(EXO1), transcript variant 3)-isoform A
(SEQ ID NO: 155)
MGIQGLLQFIKEASEPIHVRKYKGQVVAVDTYCWLHKGAIACAEK
LAKGEPTDRYVGFCMKFVNMLLSHGIKPILVFDGCTLPSKKEVER
SRRERRQANLLKGKQLLREGKVSEARECFTRSINITHAMAHKVIK
AARSQGVDCLVAPYEADAQLAYLNKAGIVQAIITEDSDLLAFGCK
KVILKMDQFGNGLEIDQARLGMCRQLGDVFTEEKFRYMCILSGCD
YLSSLRGIGLAKACKVLRLANNPDIVKVIKKIGHYLKMNITVPED
YINGFIRANNTFLYQLVFDPIKRKLIPLNAYEDDVDPETLSYAGQ
YVDDSIALQIALGNKDINTFEQIDDYNPDTAMPAHSRSHSWDDKT
CQKSANVSSIWHRNYSPRPESGTVSDAPQLKENPSTVGVERVIST
KGLNLPRKSSIVKRPRSAELSEDDLLSQYSLSFTKKTKKNSSEGN
KSLSFSEVFVPDLVNGPINKKSVSTPPRTRNKFATFLQRKNEESG
AVVVPGTRSRFFCSSDSTDCVSNKVSIQPLDETAVTDKENNLHES
EYGDQEGKRLVDTDVARNSSDDIPNNHIPGDHIPDKATVFTDEES
YSFESSKFTRTISPPTLGTLRSCFSWSGGLGDFSRTPSPSPSTAL
QQFRRKSDSPTSLPENNMSDVSQLKSEESSDDESHPLREEACSSQ
SQESGEFSLQSSNASKLSQCSSKDSDSEESDCNIKLLDSQSDQTS
KLRLSHFSKKDTPLRNKVPGLYKSSSADSLSTTKIKPLGPARASG
LSKKPASIQKRKHHNAENKPGLQIKLNELWKNFGFKKF.
exonuclease 1 (EXO1) Accession No. NM_006027
(Homo sapiens exonuclease 1
(EXO1), transcript variant 3)-isoform B
(SEQ ID NO: 156)
MGIQGLLQFIKEASEPIHVRKYKGQVVAVDTYCWLHKGAIACAEK
LAKGEPTDRYVGFCMKFVNMLLSHGIKPILVFDGCTLPSKKEVER
SRRERRQANLLKGKQLLREGKVSEARECFTRSINITHAMAHKVIK
AARSQGVDCLVAPYEADAQLAYLNKAGIVQAIITEDSDLLAFGCK
KVILKMDQFGNGLEIDQARLGMCRQLGDVFTEEKFRYMCILSGCD
YLSSLRGIGLAKACKVLRLANNPDIVKVIKKIGHYLKMNITVPED
YINGFIRANNTFLYQLVFDPIKRKLIPLNAYEDDVDPETLSYAGQ
YVDDSIALQIALGNKDINTFEQIDDYNPDTAMPAHSRSHSWDDKT
CQKSANVSSIWHRNYSPRPESGTVSDAPQLKENPSTVGVERVIST
KGLNLPRKSSIVKRPRSAELSEDDLLSQYSLSFTKKTKKNSSEGN
KSLSFSEVFVPDLVNGPTNKKSVSTPPRTRNKFATFLQRKNEESG
AVVVPGTRSRFFCSSDSTDCVSNKVSIQPLDETAVTDKENNLHES
EYGDQEGKRLVDTDVARNSSDDIPNNHIPGDHIPDKATVFTDEES
YSFESSKFTRTISPPTLGTLRSCFSWSGGLGDFSRTPSPSPSTAL
QQFRRKSDSPTSLPENNMSDVSQLKSEESSDDESHPLREEACSSQ
SQESGEFSLQSSNASKLSQCSSKDSDSEESDCNIKLLDSQSDQTS
KLRLSHFSKKDTPLRNKVPGLYKSSSADSLSTTKIKPLGPARASG
LSKKPASIQKRKHHNAENKPGLQIKLNELWKNFGFKKDSEKLPPC
KKPLSPVRDNIQLTPEAEEDIFNKPECGRVQRAIFQ.
exonuclease 1 (EXO1) Accession No. NM_001319224
(Homo sapiens exonuclease 1
(EXO1), transcript variant 4)-isoform C
(SEQ ID NO: 157)
MGIQGLLQFIKEASEPIHVRKYKGQVVAVDTYCWLHKGAIACAEK
LAKGEPTDRYVGFCMKFVNMLLSHGIKPILVFDGCTLPSKKEVER
SRRERRQANLLKGKQLLREGKVSEARECFTRSINITHAMAHKVIK
AARSQGVDCLVAPYEADAQLAYLNKAGIVQAITEDSDLLAFGCKK
VILKMDQFGNGLEIDQARLGMCRQLGDVFTEEKFRYMCILSGCDY
LSSLRGIGLAKACKVLRLANNPDIVKVIKKIGHYLKMNITVPEDY
INGFIRANNTFLYQLVFDPIKRKLIPLNAYEDDVDPETLSYAGQY
VDDSIALQIALGNKDINTFEQIDDYNPDTAMPAHSRSHSWDDKTC
QKSANVSSIWHRNYSPRPESGTVSDAPQLKENPSTVGVERVISTK
GLNLPRKSSIVKRPRSELSEDDLLSQYSLSFTKKTKKNSSEGNKS
LSFSEVFVPDLVNGPINKKSVSTPPRTRNKFATFLQRKNEESGAV
VVPGTRSRFFCSSDSTDCVSNKVSIQPLDETAVTDKENNLHESEY
GDQEGKRLVDTDVARNSSDDIPNNHIPGDHIPDKATVFTDEESYS
FESSKFTRTISPPTLGTLRSCFSWSGGLGDFSRTPSPSPSTALQQ
FRRKSDSPTSLPENNMSDVSQLKSEESSDDESHPLREEACSSQSQ
ESGEFSLQSSNASKLSQCSSKDSDSEESDCNIKLLDSQSDQTSKL
RLSHFSKKDTPLRNKVPGLYKSSSADSLSTTKIKPLGPARASGLS
KKPASIQKRKHHNAENKPGLQIKLNELWKNFGFKKDSEKLPPCKK
PLSPVRDNIQLTPEAEEDIFNKPECGRVQRAIFQ.

### D. Inteins and Split-Inteins

[0612] It will be understood that in some embodiments (e.g., delivery of a prime editor in vivo using AAV particles), it may be advantageous to split a polypeptide (e.g., a deaminase or a napDNAbp) or a fusion protein (e.g., a prime editor) into an N-terminal half and a C-terminal half, delivery them separately, and then allow their colocalization to reform the complete protein (or fusion protein as the case may be) within the cell. Separate halves of a protein or a fusion protein may each comprise a split-intein tag to facilitate the reformation of the complete protein or fusion protein by the mechanism of protein trans splicing.

[0613] Protein trans-splicing, catalyzed by split inteins, provides an entirely enzymatic method for protein ligation. A split-intein is essentially a contiguous intein (e.g., a mini-intein) split into two pieces named N-intein and C-intein, respectively. The N-intein and C-intein of a split intein can associate non-covalently to form an active intein and catalyze the splicing reaction essentially in same way as a contiguous intein does. Split inteins have been found in nature and also engineered in laboratories. As used herein, the term “split intein” refers to any intein in which one or more peptide bond breaks exists between the N-terminal and C-terminal amino acid sequences such that the N-terminal and C-terminal sequences become separate molecules that can non-covalently reassociate, or reconstitute, into an intein that is functional for trans-splicing reactions. Any catalytically active intein, or fragment thereof, may be used to derive a split intein for use in the methods of the invention. For example, in one aspect the split intein may be derived from a eukaryotic intein. In another aspect, the split intein may be derived from a bacterial intein. In another aspect, the split intein may be derived from an archaeal intein. Preferably, the split intein so-derived will possess only the amino acid sequences essential for catalyzing trans-splicing reactions.

[0614] As used herein, the “N-terminal split intein (In)” refers to any intein sequence that comprises an N-terminal amino acid sequence that is functional for trans-splicing reactions. An In thus also comprises a sequence that is spliced out when trans-splicing occurs. An In can comprise a sequence that is a modification of the N-terminal portion of a naturally occurring intein sequence. For example, an In can comprise additional amino acid residues and/or mutated residues so long as the inclusion of such additional and/or mutated residues does not render the In non-functional in trans-splicing. Preferably, the inclusion of the additional and/or mutated residues improves or enhances the trans-splicing activity of the In.

[0615] As used herein, the “C-terminal split intein (Ic)” refers to any intein sequence that comprises a C-terminal amino acid sequence that is functional for trans-splicing reactions. In one aspect, the Ic comprises 4 to 7 contiguous amino acid residues, at least 4 amino acids of which are from the last β-strand of the intein from which it was derived. An Ic thus also comprises a sequence that is spliced out when trans-splicing occurs. An Ic can comprise a sequence that is a modification of the C-terminal portion of a naturally occurring intein sequence. For example, an Ic can comprise additional amino acid residues and/or mutated residues so long as the inclusion of such additional and/or mutated residues does not render the In non-functional in trans-splicing. Preferably, the inclusion of the additional and/or mutated residues improves or enhances the trans-splicing activity of the Ic.

[0616] In some embodiments of the invention, a peptide linked to an Ic or an In can comprise an additional chemical moiety including, among others, fluorescence groups, biotin, polyethylene glycol (PEG), amino acid analogs, unnatural amino acids, phosphate groups, glycosyl groups, radioisotope labels, and pharmaceutical molecules. In other embodiments, a peptide linked to an Ic can comprise one or more chemically reactive groups including, among others, ketone, aldehyde. Cys residues and Lys residues. The N-intein and C-intein of a split intein can associate non-covalently to form an active intein and catalyze the splicing reaction when an “intein-splicing polypeptide (ISP)” is present. As used herein, “intein-splicing polypeptide (ISP)” refers to the portion of the amino acid sequence of a split intein that remains when the Ic, In, or both, are removed from the split intein. In certain embodiments, the In comprises the ISP. In another embodiment, the Ic comprises the ISP. In yet another embodiment, the ISP is a separate peptide that is not covalently linked to In nor to Ic.

[0617] Split inteins may be created from contiguous inteins by engineering one or more split sites in the unstructured loop or intervening amino acid sequence between the −12 conserved beta-strands found in the structure of mini-inteins. Some flexibility in the position of the split site within regions between the beta-strands may exist, provided that creation of the split will not disrupt the structure of the intein, the structured beta-strands in particular, to a sufficient degree that protein splicing activity is lost.

[0618] In protein trans-splicing, one precursor protein consists of an N-extein part followed by the N-intein, another precursor protein consists of the C-intein followed by a C-extein part, and a trans-splicing reaction (catalyzed by the N- and C-inteins together) excises the two intein sequences and links the two extein sequences with a peptide bond. Protein trans-splicing, being an enzymatic reaction, can work with very low (e.g., micromolar) concentrations of proteins and can be carried out under physiological conditions.

[0619] Exemplary sequences are as follows:

| NAME | SEQUENCE OF LIGAND-DEPENDENT INTEIN |
|---|---|
| 2-4 | CLAEGTRIFDPVTGTTHRIEDVVDGRKPIHVVAAAKDGTL |
| INTEIN: | LARPVVSWFDQGTRDVIGLRIAGGAIVWATPDHKVLTEYG |
| | WRAAGELRKGDRVAGPGGSGNSLALSLTADQMVSALLDAE |
| | PPILYSEYDPTSPFSEASMMGLLTNLADRELVHMINWAKR |
| | VPGFVDLTLHDQAHLLECAWLEILMIGLVWRSMEHPGKLL |
| | FAPNLLLDRNQGKCVEGMVEIFDMLLATSSRFRMMNLQGE |
| | EFVCLKSIILLNSGVYTFLSSTLKSLEEKDHIHRALDKIT |
| | DTLIHLMAKAGLTLQQQHQRLAQLLLILSHIRHMSNKGME |
| | HLYSMKYKNVVPLYDLLLEMLDAHRLHAGGSGASRVQAFA |
| | DALDDKFLHDMLAEELRYSVIREVLPTRRARTFDLEVEEL |
| | HTLVAEGVVVHNC (SEQ ID NO: 158) |
| 3-2 | CLAEGTRIFDPVTGTTHRIEDVVDGRKPIHVVAVAKDGTL |
| INTEIN | LARPVVSWFDQGTRDVIGLRIAGGAIVWATPDHKVLTEYG |
| | WRAAGELRKGDRVAGPGGSGNSLALSLTADQMVSALLDAE |
| | PPILYSEYDPTSPFSEASMMGLLTNLADRELVHMINWAKR |
| | VPGFVDLTLHDQAHLLECAWLEILMIGLVWRSMEHPGKLL |
| | FAPNLLLDRNQGKCVEGMVEIFDMLLATSSRFRMMNLQGE |
| | EFVCLKSIILLNSGVYTFLSSTLKSLEEKDHIHRALDKIT |
| | DTLIHLMAKAGLTLQQQHQRLAQLLLILSHIRHMSNKGME |
| | HLYSMKYTNVVPLYDLLLEMLDAHRLHAGGSGASRVQAFA |
| | DALDDKFLHDMLAEELRYSVIREVLPTRRARTFDLEVEEL |
| | HTLVAEGVVVHNC (SEQ ID NO: 159) |
| 30R3-1 | CLAEGTRIFDPVTGTTHRIEDVVDGRKPIHVVAAAKDGTL |
| INTEIN | LARPVVSWFDQGTRDVIGLRIAGGATVWATPDHKVLTEYG |
| | WRAAGELRKGDRVAGPGGSGNSLALSLTADQMVSALLDAE |
| | PPIPYSEYDPTSPFSEASMMGLLTNLADRELVHMINWAKR |
| | VPGFVDLTLHDQAHLLECAWLEILMIGLVWRSMEHPGKLL |
| | FAPNLLLDRNQGKCVEGMVEIFDMLLATSSRFRMMNLQGE |
| | EFVCLKSIILLNSGVYTFLSSTLKSLEEKDHIHRALDKIT |
| | DTLIHLMAKAGLTLQQQHQRLAQLLLILSHIRHMSNKGME |
| | HLYSMKYKNVVPLYDLLLEMLDAHRLHAGGSGASRVQAFA |
| | DALDDKFLHDMLAEGLRYSVIREVLPTRRARTFDLEVEEL |
| | HTLVAEGVVVHNC (SEQ ID NO: 160) |
| 30R3-2 | CLAEGTRIFDPVTGTTHRIEDVVDGRKPIHVVAAAKDGTL |
| INTEIN | LARPVVSWFDQGTRDVIGLRIAGGATVWATPDHKVLTEYG |
| | WRAAGELRKGDRVAGPGGSGNSLALSLTADQMVSALLDAE |
| | PPILYSEYDPTSPFSEASMMGLLTNLADRELVHMINWAKR |
| | VPGFVDLTLHDQAHLLECAWLEILMIGLVWRSMEHPGKLL |
| | FAPNLLLDRNQGKCVEGMVEIFDMLLATSSRFRMMNLQGE |
| | EFVCLKSIILLNSGVYTFLSSTLKSLEEKDHIHRALDKIT |
| | DTLIHLMAKAGLTLQQQHQRLAQLLLILSHIRHMSNKGME |
| | HLYSMKYKNVVPLYDLLLEMLDAHRLHAGGSGASRVQAFA |
| | DALDDKFLHDMLAEELRYSVIREVLPTRRARTFDLEVEEL |
| | HTLVAEGVVVHNC (SEQ ID NO: 161) |
| 30R3-3 | CLAEGTRIFDPVTGTTHRIEDVVDGRKPIHVVAAAKDGTL |
| INTEIN | LARPVVSWFDQGTRDVIGLRIAGGATVWATPDHKVLTEYG |
| | WRAAGELRKGDRVAGPGGSGNSLALSLTADQMVSALLDAE |
| | PPIPYSEYDPTSPFSEASMMGLLTNLADRELVHMINWAKR |
| | VPGFVDLTLHDQAHLLECAWLEILMIGLVWRSMEHPGKLL |
| | FAPNLLLDRNQGKCVEGMVEIFDMLLATSSRFRMMNLQGE |
| | EFVCLKSIILLNSGVYTFLSSTLKSLEEKDHIHRALDKIT |
| | DTLIHLMAKAGLTLQQQHQRLAQLLLILSHIRHMSNKGME |
| | HLYSMKYKNVVPLYDLLLEMLDAHRLHAGGSGASRVQAFA |
| | DALDDKFLHDMLAEELRYSVIREVLPTRRARTFDLEVEEL |
| | HTLVAEGVVVHNC (SEQ ID NO: 162) |
| 37R3-1 | CLAEGTRIFDPVTGTTHRIEDVVDGRKPIHVVAAAKDGTL |
| INTEIN | LARPVVSWFDQGTRDVIGLRIAGGATVWATPDHKVLTEYG |
| | WRAAGELRKGDRVAGPGGSGNSLALSLTADQMVSALLDAE |
| | PPILYSEYNPTSPFSEASMMGLLTNLADRELVHMINWAKR |
| | VPGFVDLTLHDQAHLLERAWLEILMIGLVWRSMEHPGKLL |
| | FAPNLLLDRNQGKCVEGMVEIFDMLLATSSRFRMMNLQGE |
| | EFVCLKSIILLNSGVYTFLSSTLKSLEEKDHIHRALDKIT |
| | DTLIHLMAKAGLTLQQQHQRLAQLLLILSHIRHMSNKGME |
| | HLYSMKYKNVVPLYDLLLEMLDAHRLHAGGSGASRVQAFA |
| | DALDDKFLHDMLAEGLRYSVIREVLPTRRARTFDLEVEEL |
| | HTLVAEGVVVHNC |
| | ((SEQ ID NO: 163) |
| 37R3-2 | CLAEGTRIFDPVTGTTHRIEDVVDGRKPIHVVAAAKDGTL |
| INTEIN | LARPVVSWFDQGTRDVIGLRIAGGAIVWATPDHKVLTEYG |
| | WRAAGELRKGDRVAGPGGSGNSLALSLTADQMVSALLDAE |
| | PPILYSEYDPTSPFSEASMMGLLTNLADRELVHMINWAKR |
| | VPGFVDLTLHDQAHLLERAWLEILMIGLVWRSMEHPGKLL |
| | FAPNLLLDRNQGKCVEGMVEIFDMLLATSSRFRMMNLQGE |
| | EFVCLKSIILLNSGVYTFLSSTLKSLEEKDHIHRALDKIT |
| | DTLIHLMAKAGLTLQQQHQRLAQLLLILSHIRHMSNKGME |
| | HLYSMKYKNVVPLYDLLLEMLDAHRLHAGGSGASRVQAFA |
| | DALDDKFLHDMLAEGLRYSVIREVLPTRRARTFDLEVEEL |
| | HTLVAEGVVVHNC (SEQ ID NO: 164) |
| 37R3-3 | CLAEGTRIFDPVTGTTHRIEDVVDGRKPIHVVAVAKDGTL |
| INTEIN | LARPVVSWFDQGTRDVIGLRIAGGATVWATPDHKVLTEYG |
| | WRAAGELRKGDRVAGPGGSGNSLALSLTADQMVSALLDAE |
| | PPILYSEYDPTSPFSEASMMGLLTNLADRELVHMINWAKR |
| | VPGFVDLTLHDQAHLLERAWLEILMIGLVWRSMEHPGKLL |
| | FAPNLLLDRNQGKCVEGMVEIFDMLLATSSRFRMMNLQGE |
| | EFVCLKSIILLNSGVYTFLSSTLKSLEEKDHIHRALDKIT |
| | DTLIHLMAKAGLTLQQQHQRLAQLLLILSHIRHMSNKGME |
| | HLYSMKYKNVVPLYDLLLEMLDAHRLHAGGSGASRVQAFA |
| | DALDDKFLHDMLAEELRYSVIREVLPTRRARTFDLEVEEL |
| | HTLVAEGVVVHNC (SEQ ID NO: 165) |

[0620] Although inteins are most frequently found as a contiguous domain, some exist in a naturally split form. In this case, the two fragments are expressed as separate polypeptides and must associate before splicing takes place, so-called protein trans-splicing.

[0621] An exemplary split intein is the Ssp DnaE intein, which comprises two subunits, namely, DnaE-N and DnaE-C. The two different subunits are encoded by separate genes, namely dnaE-n and dnaE-c, which encode the DnaE-N and DnaE-C subunits, respectively. DnaE is a naturally occurring split intein in Synechocytis sp. PCC6803 and is capable of directing trans-splicing of two separate proteins, each comprising a fusion with either DnaE-N or DnaE-C.

[0622] Additional naturally occurring or engineered split-intein sequences are known in the or can be made from whole-intein sequences described herein or those available in the art. Examples of split-intein sequences can be found in Stevens et al., “A promiscuous split intein with expanded protein engineering applications,” PNAS, 2017, Vol. 114: 8538-8543; Iwai et al., “Highly efficient protein trans-splicing by a naturally split DnaE intein from Nostc punctiforme, FEBS Lett, 580: 1853-1858, each of which are incorporated herein by reference. Additional split intein sequences can be found, for example, in WO 2013/045632, WO 2014/055782, WO 2016/069774, and EP2877490, the contents each of which are incorporated herein by reference. In addition, protein splicing in trans has been described in vivo and in vitro (Shingledecker, et al., Gene 207:187 (1998), Southworth, et al., EMBO J. 17:918 (1998); Mills, et al., Proc. Natl. Acad. Sci. USA, 95:3543-3548 (1998); Lew, et al., J. Biol. Chem., 273:15887-15890 (1998); Wu, et al., Biochim. Biophys. Acta 35732:1 (1998b), Yamazaki, et al., J. Am. Chem. Soc. 120:5591 (1998), Evans, et al., J. Biol. Chem. 275:9091 (2000); Otomo, et al., Biochemistry 38:16040-16044 (1999); Otomo, et al., J. Biolmol. NMR 14:105-114 (1999); Scott, et al., Proc. Natl. Acad. Sci. USA 96:13638-13643 (1999)) and provides the opportunity to express a protein as to two inactive fragments that subsequently undergo ligation to form a functional product.

### RNA-Protein Interaction Domain

[0623] In various embodiments, two separate protein domains (e.g., a Cas9 domain and a polymerase domain) may be colocalized to one another to form a functional complex (akin to the function of a fusion protein comprising the two separate protein domains) by using an “RNA-protein recruitment system,” such as the “MS2 tagging technique.” Such systems generally tag one protein domain with an “RNA-protein interaction domain” (aka “RNA-protein recruitment domain”) and the other with an “RNA-binding protein” that specifically recognizes and binds to the RNA-protein interaction domain, e.g., a specific hairpin structure. These types of systems can be leveraged to colocalize the domains of a prime editor, as well as to recruitment additional functionalities to a prime editor, such as a UGI domain. In one example, the MS2 tagging technique is based on the interaction of the MS2 bacteriophage coat protein (“MCP” or “MS2cp”) with a stem-loop or hairpin structure present in the genome of the phage, i.e., the “MS2 hairpin.” In the case of the MS2 hairpin, it is recognized and bound by the MS2 bacteriophage coat protein (MCP). Thus, in one exemplary scenario a deaminase-MS2 fusion can recruit a Cas9-MCP fusion.

[0624] A review of other modular RNA-protein interaction domains are described in the art, for example, in Johansson et al., “RNA recognition by the MS2 phage coat protein,” Sen Virol., 1997, Vol. 8(3): 176-185; Delebecque et al., “Organization of intracellular reactions with rationally designed RNA assemblies,” Science, 2011, Vol. 333: 470-474; Mali et al., “Cas9 transcriptional activators for target specificity screening and paired nickases for cooperative genome engineering,” Nat. Biotechnol., 2013, Vol. 31: 833-838; and Zalatan et al., “Engineering complex synthetic transcriptional programs with CRISPR RNA scaffolds,” Cell, 2015, Vol. 160: 339-350, each of which are incorporated herein by reference in their entireties. Other systems include the PP7 hairpin, which specifically recruits the PCP protein, and the “com” hairpin, which specifically recruits the Com protein. See Zalatan et al.

[0625] The nucleotide sequence of the MS2 hairpin (or equivalently referred to as the “MS2 aptamer”) is: GCCAACATGAGGATCACCCATGTCTGCAGGGCC (SEQ ID NO: 166). The amino acid sequence of the MCP or MS2cp is:

(SEQ ID NO: 167)
GSASNFTQFVLVDNGGTGDVTVAPSNFANGVAEWISSNSRSQAYK
VTCSVRQSSAQNRKYTIKVEVPKVATQTVGGEELPVAGWRSYLNM
ELTIPIFATNSDCELIVKAMQGLLKDGNPIPSAIAANSGIY.

### E. UGI Domain

[0626] In other embodiments, the prime editors utilized in the methods and compositions described herein may comprise one or more uracil glycosylase inhibitor domains. The term “uracil glycosylase inhibitor (UGI)” or “UGI domain.” as used herein, refers to a protein that is capable of inhibiting a uracil-DNA glycosylase base-excision repair enzyme. In some embodiments, a UGI domain comprises a wild-type UGI or a UGI as set forth in SEQ ID NO: 168. In some embodiments, the UGI proteins provided herein include fragments of UGI and proteins homologous to a UGI or a UGI fragment. For example, in some embodiments, a UGI domain comprises a fragment of the amino acid sequence set forth in SEQ ID NO: 168. In some embodiments, a UGI fragment comprises an amino acid sequence that comprises at least 60%, at least 65%, at least 70%, at least 75%, at least 80%, at least 85%, at least 90%, at least 95%, at least 96%, at least 97%, at least 98%, at least 99%, or at least 99.5% of the amino acid sequence as set forth in SEQ ID NO: 168. In some embodiments, a UGI comprises an amino acid sequence homologous to the amino acid sequence set forth in SEQ ID NO: 168, or an amino acid sequence homologous to a fragment of the amino acid sequence set forth in SEQ ID NO: 168. In some embodiments, proteins comprising UGI or fragments of UGI or homologs of UGI or UGI fragments are referred to as “UGI variants.” A UGI variant shares homology to UGI, or a fragment thereof. For example, a UGI variant is at least 70% identical, at least 75% identical, at least 80% identical, at least 85% identical, at least 90% identical, at least 95% identical, at least 96% identical, at least 97% identical, at least 98% identical, at least 99% identical, at least 99.5% identical, or at least 99.9% identical to a wild type UGI or a UGI as set forth in SEQ ID NO: 168. In some embodiments, the UGI variant comprises a fragment of UGI, such that the fragment is at least 70% identical, at least 80% identical, at least 90% identical, at least 95% identical, at least 96% identical, at least 97% identical, at least 98% identical, at least 99% identical, at least 99.5% identical, or at least 99.9% to the corresponding fragment of wild-type UGI or a UGI as set forth in SEQ ID NO: 168. In some embodiments, the UGI comprises the following amino acid sequence:

Uracil-DNA glycosylase inhibitor:
>sp|P14739|UNGI_BPPB2
(SEQ ID NO: 168)
MTNLSDIIEKETGKQLVIQESILMLPEEVEEVIGNKPESDILVHT
AYDESTDENVMLLTSDAPEYKPWALVIQDSNGENKIKML.

[0627] The prime editors utilized in the methods and compositions described herein may comprise more than one UGI domain, which may be separated by one or more linkers as described herein.

### F. Additional PE Elements

[0628] In certain embodiments, the prime editors utilized in the methods and compositions described herein may comprise an inhibitor of base repair. The term “inhibitor of base repair” or “IBR” refers to a protein that is capable in inhibiting the activity of a nucleic acid repair enzyme, for example a base excision repair enzyme. In some embodiments, the IBR is an inhibitor of OGG base excision repair. In some embodiments, the IBR is an inhibitor of base excision repair (“iBER”). Exemplary inhibitors of base excision repair include inhibitors of APE1. Endo III. Endo IV, Endo V, Endo VIII, Fpg, hOGG1, hNEIL1, T7 EndoI, T4PDG, UDG, hSMUG1, and hAAG. In some embodiments, the IBR is an inhibitor of Endo V or hAAG. In some embodiments, the IBR is an iBER that may be a catalytically inactive glycosylase or catalytically inactive dioxygenase or a small molecule or peptide inhibitor of an oxidase, or variants thereof. In some embodiments, the IBR is an iBER that may be a TDG inhibitor, MBD4 inhibitor or an inhibitor of an AlkBH enzyme. In some embodiments, the IBR is an iBER that comprises a catalytically inactive TDG or catalytically inactive MBD4. An exemplary catalytically inactive TDG is an N140A mutant of SEQ ID NO: 172 (human TDG).

[0629] Some exemplary glycosylases are provided below. The catalytically inactivated variants of any of these glycosylase domains are iBERs that may be fused to the napDNAbp or polymerase domain of the prime editors utilized in the methods and compositions provided in this disclosure.

OGG (human)
(SEQ ID NO: 169)
MPARALLPRRMGHRTLASTPALWASIPCPRSELRLDLVLPSGQSF
RWREQSPAHWSGVLADQVWTLTQTEEQLHCTVYRGDKSQASRPTP
DELEAVRKYFQLDVTLAQLYHHWGSVDSHFQEVAQKFQGVRLLRQ
DPIECLFSFICSSNNNIARITGMVERLCQAFGPRLIQLDDVTYHG
FPSLQALAGPEVEAHLRKLGLGYRARYVSASARAILEEQGGLAWL
QQLRESSYEEAHKALCILPGVGTKVADCICLMALDKPQAVPVDVH
MWHIAQRDYSWHPTTSQAKGPSPQTNKELGNFFRSLWGPYAGWAQ
AVLFSADLRQSRHAQEPPAKRRKGSKGPEG
MPG (human)
(SEQ ID NO: 170)
MVTPALQMKKPKQFCRRMGQKKQRPARAGQPHSSSDAAQAPAEQP
HSSSDAAQAPCPRERCLGPPTTPGPYRSIYFSSPKGHLTRLGLEF
FDQPAVPLARAFLGQVLVRRLPNGTELRGRIVETEAYLGPEDEAA
HSRGGRQTPRNRGMFMKPGTLYVYIIYGMYFCMNISSQGDGACVL
LRALEPLEGLETMRQLRSTLRKGTASRVLKDRELCSGPSKLCQAL
AINKSFDQRDLAQDEAVWLERGPLEPSEPAVVAAARVGVGHAGEW
ARKPLRFYVRGSPWVSVVDRVAEQDTQA
MBD4 (human)
(SEQ ID NO: 171)
MGTTGLESLSLGDRGAAPTVTSSERLVPDPPNDLRKEDVAMELER
VGEDEEQMMIKRSSECNPLLQEPIASAQFGATAGTECRKSVPCGW
ERVVKQRLFGKTAGREDVYFISPQGLKFRSKSSLANYLHKNGETS
LKPEDFDFTVLSKRGIKSRYKDCSMAALTSHLQNQSNNSNWNLRT
RSKCKKDVFMPPSSSSELQESRGLSNFTSTHLLLKEDEGVDDVNF
RKVRKPKGKVTILKGIPIKKTKKGCRKSCSGFVQSDSKRESVCNK
ADAESEPVAQKSQLDRTVCISDAGACGETLSVTSEENSLVKKKER
SLSSGSNFCSEQKTSGIINKFCSAKDSEHNEKYEDTFLESEEIGT
KVEVVERKEHLHTDILKRGSEMDNNCSPTRKDFTGEKIFQEDTIP
RTQIERRKTSLYFSSKYNKEALSPPRRKAFKKWTPPRSPFNLVQE
TLFHDPWKLLIATIFLNRTSGKMAIPVLWKFLEKYPSAEVARTAD
WRDVSELLKPLGLYDLRAKTIVKFSDEYLTKQWKYPIELHGIGKY
GNDSYRIFCVNEWKQVHPEDHKLNKYHDWLWENHEKLSLS
TDG (human)
(SEQ ID NO: 172)
MEAENAGSYSLQQAQAFYTFPFQQLMAEAPNMAVVNEQQMPEEVP
APAPAQEPVQEAPKGRKRKPRTTEPKQPVEPKKPVESKKSGKSAK
SKEKQEKITDTFKVKRKVDRENGVSEAELLTKTLPDILTFNLDIV
IIGINPGLMAAYKGHHYPGPGNHFWKCLFMSGLSEVQLNHMDDHT
LPGKYGIGFTNMVERTTPGSKDLSSKEFREGGRILVQKLQKYQPR
IAVENGKCIYEIFSKEVFGVKVKNLEFGLQPHKIPDTETLCYVMP
SSSARCAQFPRAQDKVHYYIKLKDLRDQLKGIERNMDVQEVQYTF
DLQLAQEDAKKMAVKEEKYDPGYEAAYGGAYGENPCSSEPCGFSS
NGLIESVELRGESAFSGIPNGQWMTQSFTDQIPSFSNHCGTQEQE
EESHA

[0630] In some embodiments, the fusion proteins described herein may comprise one or more heterologous protein domains (e.g., about or more than about 1, 2, 3, 4, 5, 6, 7, 8, 9, 10, or more domains in addition to the prime editor components). A fusion protein may comprise any additional protein sequence, and optionally a linker sequence between any two domains. Other exemplary features that may be present are localization sequences, such as cytoplasmic localization sequences, export sequences, such as nuclear export sequences, or other localization sequences, as well as sequence tags that are useful for solubilization, purification, or detection of the fusion proteins.

[0631] Examples of protein domains that may be fused to a prime editor or component thereof (e.g., the napDNAbp domain, the polymerase domain, or the NLS domain) include, without limitation, epitope tags, and reporter gene sequences. Non-limiting examples of epitope tags include histidine (His) tags, V5 tags. FLAG tags, influenza hemagglutinin (HA) tags, Myc tags, VSV-G tags, and thioredoxin (Trx) tags. Examples of reporter genes include, but are not limited to, glutathione-5-transferase (GST), horseradish peroxidase (HRP), chloramphenicol acetyltransferase (CAT), beta-galactosidase, beta-glucuronidase, luciferase, green fluorescent protein (GFP), HcRed, DsRed, cyan fluorescent protein (CFP), yellow fluorescent protein (YFP), and autofluorescent proteins including blue fluorescent protein (BFP). A prime editor may be fused to a gene sequence encoding a protein or a fragment of a protein that bind DNA molecules or bind other cellular molecules, including, but not limited to, maltose binding protein (MBP), S-tag, Lex A DNA binding domain (DBD) fusions, GAL4 DNA binding domain fusions, and herpes simplex virus (HSV) BP16 protein fusions. Additional domains that may form part of a prime editor are described in US Patent Publication No. 2011/0059502, published Mar. 10, 2011 and incorporated herein by reference in its entirety.

[0632] In an aspect of the disclosure, a reporter gene which includes, but is not limited to, glutathione-5-transferase (GST), horseradish peroxidase (HRP), chloramphenicol acetyltransferase (CAT) beta-galactosidase, beta-glucuronidase, luciferase, green fluorescent protein (GFP), HcRed, DsRed, cyan fluorescent protein (CFP), yellow fluorescent protein (YFP), and autofluorescent proteins including blue fluorescent protein (BFP), may be introduced into a cell to encode a gene product which serves as a marker by which to measure the alteration or modification of expression of the gene product. In certain embodiments of the disclosure the gene product is luciferase. In a further embodiment of the disclosure the expression of the gene product is decreased.

[0633] Suitable protein tags provided herein include, but are not limited to, biotin carboxylase carrier protein (BCCP) tags, myc-tags, calmodulin-tags, FLAG-tags, hemagglutinin (HA)-tags, polyhistidine tags, also referred to as histidine tags or His-tags, maltose binding protein (MBP)-tags, nus-tags, glutathione-S-transferase (GST)-tags, green fluorescent protein (GFP)-tags, thioredoxin-tags, S-tags, Softags (e.g., Softag 1, Softag 3), strep-tags, biotin ligase tags, FlAsH tags, V5 tags, and SBP-tags. Additional suitable sequences will be apparent to those of skill in the art. In some embodiments, the fusion protein comprises one or more His tags.

[0634] In some embodiments of the present disclosure, the activity of the prime editing system may be temporally regulated by adjusting the residence time, the amount, and/or the activity of the expressed components of the PE system. For example, as described herein, the PE may be fused with a protein domain that is capable of modifying the intracellular half-life of the PE. In certain embodiments involving two or more vectors (e.g., a vector system in which the components described herein are encoded on two or more separate vectors), the activity of the PE system may be temporally regulated by controlling the timing in which the vectors are delivered. For example, in some embodiments a vector encoding the nuclease system may deliver the PE prior to the vector encoding the template. In other embodiments, the vector encoding the PEgRNA may deliver the guide prior to the vector encoding the PE system. In some embodiments, the vectors encoding the PE system and PEgRNA are delivered simultaneously. In certain embodiments, the simultaneously delivered vectors temporally deliver, e.g., the PE, PEgRNA, and/or second strand guide RNA components. In further embodiments, the RNA (such as, e.g., the nuclease transcript) transcribed from the coding sequence on the vectors may further comprise at least one element that is capable of modifying the intracellular half-life of the RNA and/or modulating translational control. In some embodiments, the half-life of the RNA may be increased. In some embodiments, the half-life of the RNA may be decreased. In some embodiments, the element may be capable of increasing the stability of the RNA. In some embodiments, the element may be capable of decreasing the stability of the RNA. In some embodiments, the element may be within the 3′ UTR of the RNA. In some embodiments, the element may include a polyadenylation signal (PA). In some embodiments, the element may include a cap, e.g., an upstream mRNA or PEgRNA end. In some embodiments, the RNA may comprise no PA such that it is subject to quicker degradation in the cell after transcription. In some embodiments, the element may include at least one AU-rich element (ARE). The AREs may be bound by ARE binding proteins (ARE-BPs) in a manner that is dependent upon tissue type, cell type, timing, cellular localization, and environment. In some embodiments the destabilizing element may promote RNA decay, affect RNA stability, or activate translation. In some embodiments, the ARE may comprise 50 to 150 nucleotides in length. In some embodiments, the ARE may comprise at least one copy of the sequence AUUUA. In some embodiments, at least one ARE may be added to the 3′ UTR of the RNA. In some embodiments, the element may be a Woodchuck Hepatitis Virus (WHP).

[0635] Posttranscriptional Regulatory Element (WPRE), which creates a tertiary structure to enhance expression from the transcript. In further embodiments, the element is a modified and/or truncated WPRE sequence that is capable of enhancing expression from the transcript, as described, for example in Zufferey et al., J Virol, 73(4): 2886-92 (1999) and Flajolet et al., J Virol, 72(7): 6175-80 (1998). In some embodiments, the WPRE or equivalent may be added to the 3′ UTR of the RNA. In some embodiments, the element may be selected from other RNA sequence motifs that are enriched in either fast- or slow-decaying transcripts. In some embodiments, the vector encoding the PE or the PEgRNA may be self-destroyed via cleavage of a target sequence present on the vector by the PE system. The cleavage may prevent continued transcription of a PE or a PEgRNA from the vector. Although transcription may occur on the linearized vector for some amount of time, the expressed transcripts or proteins subject to intracellular degradation will have less time to produce off-target effects without continued supply from expression of the encoding vectors.

### PEgRNAs

[0636] The prime editing system utilized in the methods and compositions described herein contemplates the use of any suitable PEgRNAs.

### PEgRNA Architecture

[0637] In some embodiments, an extended guide RNA usable in the prime editing system utilized in the methods and compositions disclosed herein whereby a traditional guide RNA includes a ˜20 nt protospacer sequence and a gRNA core region, which binds with the napDNAbp. In this embodiment, the guide RNA includes an extended RNA segment at the 5′ end, i.e., a 5′ extension. In this embodiment, the 5′extension includes a reverse transcription template sequence, a reverse transcription primer binding site, and an optional 5-20 nucleotide linker sequence. The RT primer binding site hybridizes to the free 3′ end that is formed after a nick is formed in the non-target strand of the R-loop, thereby priming reverse transcriptase for DNA polymerization in the 5′-3′ direction.

[0638] In another embodiment, an extended guide RNA usable in the prime editing system utilized in the methods and compositions disclosed herein whereby a traditional guide RNA includes a ˜20 nt protospacer sequence and a gRNA core, which binds with the napDNAbp. In this embodiment, the guide RNA includes an extended RNA segment at the 3′ end, i.e., a 3′ extension. In this embodiment, the 3′extension includes a reverse transcription template sequence, and a reverse transcription primer binding site. The RT primer binding site hybridizes to the free 3′ end that is formed after a nick is formed in the non-target strand of the R-loop, thereby priming reverse transcriptase for DNA polymerization in the 5′-3′ direction.

[0639] In another embodiment, an extend guide RNA usable in the prime editing system utilized in the methods and compositions disclosed herein whereby a traditional guide RNA includes a ˜20 nt protospacer sequence and a gRNA core, which binds with the napDNAbp. In this embodiment, the guide RNA includes an extended RNA segment at an intermolecular position within the gRNA core, i.e., an intramolecular extension. In this embodiment, the intramolecular extension includes a reverse transcription template sequence, and a reverse transcription primer binding site. The RT primer binding site hybridizes to the free 3′ end that is formed after a nick is formed in the non-target strand of the R-loop, thereby priming reverse transcriptase for DNA polymerization in the 5′-3′ direction.

[0640] In one embodiment, the position of the intermolecular RNA extension is not in the protospacer sequence of the guide RNA. In another embodiment, the position of the intermolecular RNA extension in the gRNA core. In still another embodiment, the position of the intermolecular RNA extension is any with the guide RNA molecule except within the protospacer sequence, or at a position which disrupts the protospacer sequence. In one embodiment, the intermolecular RNA extension is inserted downstream from the 3′ end of the protospacer sequence. In another embodiment, the intermolecular RNA extension is inserted at least 1 nucleotide, at least 2 nucleotides, at least 3 nucleotides, at least 4 nucleotides, at least 5 nucleotides, at least 6 nucleotides, at least 7 nucleotides, at least 8 nucleotides, at least 9 nucleotides, at least 10 nucleotides, at least 11 nucleotides, at least 12 nucleotides, at least 13 nucleotides, at least 14 nucleotides, at least 15 nucleotides, at least 16 nucleotides, at least 17 nucleotides, at least 18 nucleotides, at least 19 nucleotides, at least 20 nucleotides, at least 21 nucleotides, at least 22 nucleotides, at least 23 nucleotides, at least 24 nucleotides, at least 25 nucleotides downstream of the 3′ end of the protospacer sequence.

[0641] In other embodiments, the intermolecular RNA extension is inserted into the gRNA, which refers to the portion of the guide RNA corresponding or comprising the tracrRNA, which binds and/or interacts with the Cas9 protein or equivalent thereof (i.e., a different napDNAbp). Preferably the insertion of the intermolecular RNA extension does not disrupt or minimally disrupts the interaction between the tracrRNA portion and the napDNAbp.

[0642] The length of the RNA extension (which includes at least the RT template and primer binding site, e.g., see FIG. 3) can be any useful length. In various embodiments, the RNA extension is at least 5 nucleotides, at least 6 nucleotides, at least 7 nucleotides, at least 8 nucleotides, at least 9 nucleotides, at least 10 nucleotides, at least 11 nucleotides, at least 12 nucleotides, at least 13 nucleotides, at least 14 nucleotides, at least 15 nucleotides, at least 16 nucleotides, at least 17 nucleotides, at least 18 nucleotides, at least 19 nucleotides, at least 20 nucleotides, at least 21 nucleotides, at least 22 nucleotides, at least 23 nucleotides, at least 24 nucleotides, at least 25 nucleotides, at least 30 nucleotides, at least 40 nucleotides, at least 50 nucleotides, at least 60 nucleotides, at least 70 nucleotides, at least 80 nucleotides, at least 90 nucleotides, at least 100 nucleotides, at least 200 nucleotides, at least 300 nucleotides, at least 400 nucleotides, or at least 500 nucleotides in length.

[0643] The RT template sequence can also be any suitable length. For example, the RT template sequence can be at least 3 nucleotides, at least 4 nucleotides, at least 5 nucleotides, at least 6 nucleotides, at least 7 nucleotides, at least 8 nucleotides, at least 9 nucleotides, at least 10 nucleotides, at least 11 nucleotides, at least 12 nucleotides, at least 13 nucleotides, at least 14 nucleotides, at least 15 nucleotides, at least 16 nucleotides, at least 17 nucleotides, at least 18 nucleotides, at least 19 nucleotides, at least 20 nucleotides, at least 30 nucleotides, at least 40 nucleotides, at least 50 nucleotides, at least 60 nucleotides, at least 70 nucleotides, at least 80 nucleotides, at least 90 nucleotides, at least 100 nucleotides, at least 200 nucleotides, at least 300 nucleotides, at least 400 nucleotides, or at least 500 nucleotides in length.

[0644] In still other embodiments, wherein the reverse transcription primer binding site sequence is at least 3 nucleotides, at least 4 nucleotides, at least 5 nucleotides, at least 6 nucleotides, at least 7 nucleotides, at least 8 nucleotides, at least 9 nucleotides, at least 10 nucleotides, at least 11 nucleotides, at least 12 nucleotides, at least 13 nucleotides, at least 14 nucleotides, at least 15 nucleotides, at least 16 nucleotides, at least 17 nucleotides, at least 18 nucleotides, at least 19 nucleotides, at least 20 nucleotides, at least 30 nucleotides, at least 40 nucleotides, at least 50 nucleotides, at least 60 nucleotides, at least 70 nucleotides, at least 80 nucleotides, at least 90 nucleotides, at least 100 nucleotides, at least 200 nucleotides, at least 300 nucleotides, at least 400 nucleotides, or at least 500 nucleotides in length.

[0645] In other embodiments, the optional linker or spacer sequence is at least 3 nucleotides, at least 4 nucleotides, at least 5 nucleotides, at least 6 nucleotides, at least 7 nucleotides, at least 8 nucleotides, at least 9 nucleotides, at least 10 nucleotides, at least 11 nucleotides, at least 12 nucleotides, at least 13 nucleotides, at least 14 nucleotides, at least 15 nucleotides, at least 16 nucleotides, at least 17 nucleotides, at least 18 nucleotides, at least 19 nucleotides, at least 20 nucleotides, at least 30 nucleotides, at least 40 nucleotides, at least 50 nucleotides, at least 60 nucleotides, at least 70 nucleotides, at least 80 nucleotides, at least 90 nucleotides, at least 100 nucleotides, at least 200 nucleotides, at least 300 nucleotides, at least 400 nucleotides, or at least 500 nucleotides in length.

[0646] The RT template sequence, in certain embodiments, encodes a single-stranded DNA molecule which is homologous to the non-target strand (and thus, complementary to the corresponding site of the target strand) but includes one or more nucleotide changes. The least one nucleotide change may include one or more single-base nucleotide changes, one or more deletions, and one or more insertions.

[0647] The synthesized single-stranded DNA product of the RT template sequence is homologous to the non-target strand and contains one or more nucleotide changes. The single-stranded DNA product of the RT template sequence hybridizes in equilibrium with the complementary target strand sequence, thereby displacing the homologous endogenous target strand sequence. The displaced endogenous strand may be referred to in some embodiments as a 5′ endogenous DNA flap species. This 5′ endogenous DNA flap species can be removed by a 5′ flap endonuclease (e.g., FEN1) and the single-stranded DNA product, now hybridized to the endogenous target strand, may be ligated, thereby creating a mismatch between the endogenous sequence and the newly synthesized strand. The mismatch may be resolved by the cell's innate DNA repair and/or replication processes.

[0648] In various embodiments, the nucleotide sequence of the RT template sequence corresponds to the nucleotide sequence of the non-target strand which becomes displaced as the 5′ flap species and which overlaps with the site to be edited.

[0649] In various embodiments of the extended guide RNAs, the reverse transcription template sequence may encode a single-strand DNA flap that is complementary to an endogenous DNA sequence adjacent to a nick site, wherein the single-strand DNA flap comprises a desired nucleotide change. The single-stranded DNA flap may displace an endogenous single-strand DNA at the nick site. The displaced endogenous single-strand DNA at the nick site can have a 5′ end and form an endogenous flap, which can be excised by the cell. In various embodiments, excision of the 5′ end endogenous flap can help drive product formation since removing the 5′ end endogenous flap encourages hybridization of the single-strand 3′ DNA flap to the corresponding complementary DNA strand, and the incorporation or assimilation of the desired nucleotide change carried by the single-strand 3′ DNA flap into the target DNA.

[0650] In various embodiments of the extended guide RNAs, the cellular repair of the single-strand DNA flap results in installation of the desired nucleotide change, thereby forming a desired product.

[0651] In still other embodiments, the desired nucleotide change is installed in an editing window that is between about −5 to +5 of the nick site, or between about −10 to +10 of the nick site, or between about −20 to +20 of the nick site, or between about −30 to +30 of the nick site, or between about −40 to +40 of the nick site, or between about −50 to +50 of the nick site, or between about −60 to +60 of the nick site, or between about −70 to +70 of the nick site, or between about −80 to +80 of the nick site, or between about −90 to +90 of the nick site, or between about −100 to +100 of the nick site, or between about −200 to +200 of the nick site.

[0652] In other embodiments, the desired nucleotide change is installed in an editing window that is between about +1 to +2 from the nick site, or about +1 to +3, +1 to +4, +1 to +5, +1 to +6, +1 to +7, +1 to +8, +1 to +9, +1 to +10, +1 to +11, +1 to +12, +l to +13, +1 to +14, +1 to +15, +1 to +16, +1 to +17, +1 to +18, +1 to +19, +1 to +20, +1 to +21, +1 to +22, +1 to +23, +1 to +24, +1 to +25, +1 to +26, +1 to +27, +1 to +28, +1 to +29, +1 to +30, +1 to +31, +1 to +32, +1 to +33, +1 to +34, +1 to +35, +1 to +36, +1 to +37, +1 to +38, +1 to +39, +1 to +40, +1 to +41, +1 to +42, +1 to +43, +1 to +44, +1 to +45, +1 to +46, +1 to +47, +1 to +48, +1 to +49, +1 to +50, +1 to +51, +1 to +52, +1 to +53, +1 to +54, +1 to +55, +1 to +56, +1 to +57, +1 to +58, +1 to +59, +1 to +60, +1 to +61, +1 to +62, +1 to +63, +1 to +64, +1 to +65, +1 to +66, +1 to +67, +1 to +68, +1 to +69, +1 to +70, +1 to +71, +1 to +72, +1 to +73, +1 to +74, +1 to +75, +1 to +76, +1 to +77, +1 to +78, +1 to +79, +1 to +80, +1 to +81, +1 to +82, +1 to +83, +1 to +84, +1 to +85, +1 to +86, +1 to +87, +1 to +88, +1 to +89, +1 to +90, +1 to +90, +1 to +91, +1 to +92, +1 to +93, +1 to +94, +1 to +95, +1 to +96, +1 to +97, +1 to +98, +1 to +99, +1 to +100, +1 to +101, +1 to +102, +1 to +103, +1 to +104, +1 to +105, +1 to +106, +1 to +107, +1 to +108, +1 to +109, +1 to +110, +1 to +111, +1 to +112, +1 to +113, +1 to +114, +1 to +115, +1 to +116, +1 to +117, +1 to +118, +1 to +119, +1 to +120, +1 to +121, +1 to +122, +1 to +123, +1 to +124, or +1 to +125 from the nick site.

[0653] In still other embodiments, the desired nucleotide change is installed in an editing window that is between about +1 to +2 from the nick site, or about +1 to +5, +1 to +10, +1 to +15, +1 to +20, +1 to +25, +1 to +30, +1 to +35, +1 to +40, +1 to +45, +1 to +50, +1 to +55, +1 to +100, +1 to +105, +1 to +110, +1 to +115, +1 to +120, +1 to +125, +1 to +130, +1 to +135, +1 to +140, +1 to +145, +1 to +150, +1 to +155, +1 to +160, +1 to +165, +1 to +170, +1 to +175, +1 to +180, +1 to +185, +1 to +190, +1 to +195, or +1 to +200, from the nick site.

[0654] In various aspects, the extended guide RNAs are modified versions of a guide RNA. Guide RNAs maybe naturally occurring, expressed from an encoding nucleic acid, or synthesized chemically. Methods are well known in the art for obtaining or otherwise synthesizing guide RNAs and for determining the appropriate sequence of the guide RNA, including the protospacer sequence which interacts and hybridizes with the target strand of a genomic target site of interest.

[0655] In various embodiments, the particular design aspects of a guide RNA sequence will depend upon the nucleotide sequence of a genomic target site of interest (i.e., the desired site to be edited) and the type of napDNAbp (e.g., Cas9 protein) present in the prime editing systems utilized in the methods and compositions described herein, among other factors, such as PAM sequence locations, percent G/C content in the target sequence, the degree of microhomology regions, secondary structures, etc.

[0656] In general, a guide sequence is any polynucleotide sequence having sufficient complementarity with a target polynucleotide sequence to hybridize with the target sequence and direct sequence-specific binding of a napDNAbp (e.g., a Cas9, Cas9 homolog, or Cas9 variant) to the target sequence. In some embodiments, the degree of complementarity between a guide sequence and its corresponding target sequence, when optimally aligned using a suitable alignment algorithm, is about or more than about 50%, 60%, 75%, 80%, 85%, 90%, 95%, 97.5%, 99%, or more. Optimal alignment may be determined with the use of any suitable algorithm for aligning sequences, non-limiting example of which include the Smith-Waterman algorithm, the Needleman-Wunsch algorithm, algorithms based on the Burrows-Wheeler Transform (e.g., the Burrows Wheeler Aligner), ClustalW, Clustal X, BLAT. Novoalign (Novocraft Technologies, ELAND (Illumina, San Diego, Calif.), SOAP (available at soap.genomics.org.cn), and Maq (available at maq.sourceforge.net). In some embodiments, a guide sequence is about or more than about 5, 10, 11, 12, 13, 14, 15, 16, 17, 18, 19, 20, 21, 22, 23, 24, 25, 26, 27, 28, 29, 30, 35, 40, 45, 50, 75, or more nucleotides in length.

[0657] In some embodiments, a guide sequence is less than about 75, 50, 45, 40, 35, 30, 25, 20, 15, 12, or fewer nucleotides in length. The ability of a guide sequence to direct sequence-specific binding of a prime editor to a target sequence may be assessed by any suitable assay. For example, the components of a prime editor, including the guide sequence to be tested, may be provided to a host cell having the corresponding target sequence, such as by transfection with vectors encoding the components of a prime editor disclosed herein, followed by an assessment of preferential cleavage within the target sequence, such as by Surveyor assay as described herein. Similarly, cleavage of a target polynucleotide sequence may be evaluated in a test tube by providing the target sequence, components of a prime editor, including the guide sequence to be tested and a control guide sequence different from the test guide sequence, and comparing binding or rate of cleavage at the target sequence between the test and control guide sequence reactions. Other assays are possible, and will occur to those skilled in the art.

[0658] A guide sequence may be selected to target any target sequence. In some embodiments, the target sequence is a sequence within a genome of a cell. Exemplary target sequences include those that are unique in the target genome. For example, for the S. pyogenes Cas9, a unique target sequence in a genome may include a Cas9 target site of the form MMMMMMMMNNNNNNNNNNNNXGG (SEQ ID NO: 173) where NNNNNNNNNNNNXGG (SEQ ID NO: 174) (N is A, G, T, or C; and X can be anything). A unique target sequence in a genome may include an S. pyogenes Cas9 target site of the form MMMMMMMMMNNNNNNNNNNNXGG (SEQ ID NO: 175) where NNNNNNNNNNNXGG (SEQ ID NO: 176) (N is A, G. T. or C; and X can be anything). For the S. thermophilus CRISPR1Cas9, a unique target sequence in a genome may include a Cas9 target site of the form MMMMMMMMNNNNNNNNNNNNXXAGAAW (SEQ ID NO: 177) where NNNNNNNNNNNNXXAGAAW (SEQ ID NO: 178) (N is A, G, T. or C; X can be anything; and W is A or T). A unique target sequence in a genome may include an S. thermophilus CRISPR 1 Cas9 target site of the form MMMMMMMMMNNNNNNNNNNNXXAGAAW (SEQ ID NO: 179) where NNNNNNNNNNNXXAGAAW (SEQ ID NO: 180) (N is A, G. T, or C; X can be anything; and W is A or T). For the S. pyogenes Cas9, a unique target sequence in a genome may include a Cas9 target site of the form MMMMMMMMNNNNNNNNNNNNXGGXG (SEQ ID NO: 181) where NNNNNNNNNNNNXGGXG (SEQ ID NO: 182) (N is A, G, T, or C; and X can be anything). A unique target sequence in a genome may include an S. pyogenes Cas9 target site of the form MMMMMMMMMNNNNNNNNNNNXGGXG (SEQ ID NO: 183) where NNNNNNNNNNNXGGXG (SEQ ID NO: 184) (N is A, G, T, or C; and X can be anything). In each of these sequences “M” may be A, G, T, or C, and need not be considered in identifying a sequence as unique.

[0659] In some embodiments, a guide sequence is selected to reduce the degree of secondary structure within the guide sequence. Secondary structure may be determined by any suitable polynucleotide folding algorithm. Some programs are based on calculating the minimal Gibbs free energy. An example of one such algorithm is mFold, as described by Zuker and Stiegler (Nucleic Acids Res. 9 (1981), 133-148). Another example folding algorithm is the online webserver RNAfold, developed at Institute for Theoretical Chemistry at the University of Vienna, using the centroid structure prediction algorithm (see e.g., A. R. Gruber et al., 2008, Cell 106(1): 23-24; and PA Carr and GM Church, 2009, Nature Biotechnology 27(12): 1151-62). Further algorithms may be found in U.S. application Ser. No. 61/836,080; Broad Reference BI-2013/004A); incorporated herein by reference.

[0660] In general, a tracr mate sequence includes any sequence that has sufficient complementarity with a tracr sequence to promote one or more of: (1) excision of a guide sequence flanked by tracr mate sequences in a cell containing the corresponding tracr sequence; and (2) formation of a complex at a target sequence, wherein the complex comprises the tracr mate sequence hybridized to the tracr sequence. In general, degree of complementarity is with reference to the optimal alignment of the tracr mate sequence and tracr sequence, along the length of the shorter of the two sequences. Optimal alignment may be determined by any suitable alignment algorithm, and may further account for secondary structures, such as self-complementarity within either the tracr sequence or tracr mate sequence. In some embodiments, the degree of complementarity between the tracr sequence and tracr mate sequence along the length of the shorter of the two when optimally aligned is about or more than about 25%, 30%, 40%, 50%, 60%, 70%, 80%, 90%, 95%, 97.5%, 99%, or higher. In some embodiments, the tracr sequence is about or more than about 5, 6, 7, 8, 9, 10, 11, 12, 13, 14, 15, 16, 17, 18, 19, 20, 25, 30, 40, 50, or more nucleotides in length. In some embodiments, the tracr sequence and tracr mate sequence are contained within a single transcript, such that hybridization between the two produces a transcript having a secondary structure, such as a hairpin. Preferred loop forming sequences for use in hairpin structures are four nucleotides in length, and most preferably have the sequence GAAA. However, longer or shorter loop sequences may be used, as may alternative sequences. The sequences preferably include a nucleotide triplet (for example, AAA), and an additional nucleotide (for example C or G). Examples of loop forming sequences include CAAA and AAAG. In an embodiment of the invention, the transcript or transcribed polynucleotide sequence has at least two or more hairpins. In preferred embodiments, the transcript has two, three, four or five hairpins. In a further embodiment of the invention, the transcript has at most five hairpins. In some embodiments, the single transcript further includes a transcription termination sequence: preferably this is a polyT sequence, for example six T nucleotides. Further non-limiting examples of single polynucleotides comprising a guide sequence, a tracr mate sequence, and a tracr sequence are as follows (listed 5′ to 3′), where “N” represents a base of a guide sequence, the first block of lower case letters represent the tracr mate sequence, and the second block of lower case letters represent the tracr sequence, and the final poly-T sequence represents the transcription terminator:

(1)
(SEQ ID NO: 185)
NNNNNNNNGTTTTTGTACTCTCAAGATTTAGAAATAAATCTTGCA
GAAGCTACAAAGATAAGGCTTCATGCCGAAATCAACACCCTGTCA
TTTTATGGCAGGGTGTTTTCGTTATTTAATTTTTT;
(2)
(SEQ ID NO: 186)
NNNNNNNNNNNNNNNNNNGTTTTTGTACTCTCAGAAATGCAGAAG
CTACAAAGATAAGGCTTCATGCCGAAATCAACACCCTGTCATTTT
ATGGCAGGGTGTTTTCGTTATTTAATTTTTT;
(3)
(SEQ ID NO: 187)
NNNNNNNNNNNNNNNNNNNNGTTTTTGTACTCTCAGAAATGCAGA
AGCTACAAAGATAAGGCTTCATGCCGAAATCAACACCCTGTCATT
TTATGGCAGGGTGTTTTTT;
(4)
(SEQ ID NO: 188)
NNNNNNNNNNNNNNNNNNNNGTTTTAGAGCTAGAAATAGCAAGTT
AAAATAAGGCTAGTCCGTTATCAACTTGAAAAAGTGGCACCGAGT
CGGTGCTTTTTT;
(5)
(SEQ ID NO: 189)
NNNNNNNNNNNNNNNNNNNNGTTTTAGAGCTAGAAATAGCAAGTT
AAAATAAGGCTAGTCCGTTATCAACTTGAAAAAGTGTTTTTTT;
and
(6)
(SEQ ID NO: 190)
NNNNNNNNNNNNNNNNNNNNGTTTTAGAGCTAGAAATAGCAAGTT
AAAATAAGGCTAGTCCGTTATCATTTTTTTT.

[0661] In some embodiments, sequences (1) to (3) are used in combination with Cas9 from S. thermophilus CRISPR1. In some embodiments, sequences (4) to (6) are used in combination with Cas9 from S. pyogenes. In some embodiments, the tracr sequence is a separate transcript from a transcript comprising the tracr mate sequence.

[0662] It will be apparent to those of skill in the art that in order to target any of the fusion proteins comprising a Cas9 domain and a single-stranded DNA binding protein, as disclosed herein, to a target site, e.g., a site comprising a point mutation to be edited, it is typically necessary to co-express the fusion protein together with a guide RNA, e.g., an sgRNA. As explained in more detail elsewhere herein, a guide RNA typically comprises a tracrRNA framework allowing for Cas9 binding, and a guide sequence, which confers sequence specificity to the Cas9:nucleic acid editing enzyme/domain fusion protein.

[0663] In some embodiments, the guide RNA comprises a structure 5′-[guide sequence]-GUUUUAGAGCUAGAAAUAGCAAGUUAAAAUAAAGGCUAGUCCGUUAUCAACUUG AAAAAGUGGCACCGAGUCGGUGCUUUUU-3′ (SEQ ID NO: 191), wherein the guide sequence comprises a sequence that is complementary to the target sequence. The guide sequence is typically 20 nucleotides long. The sequences of suitable guide RNAs for targeting Cas9:nucleic acid editing enzyme/domain fusion proteins to specific genomic target sites will be apparent to those of skill in the art based on the instant disclosure. Such suitable guide RNA sequences typically comprise guide sequences that are complementary to a nucleic sequence within 50 nucleotides upstream or downstream of the target nucleotide to be edited. Some exemplary guide RNA sequences suitable for targeting any of the provided fusion proteins to specific target sequences are provided herein. Additional guide sequences are well known in the art and can be used with the prime editors utilized in the methods and compositions described herein.

[0664] In some embodiments, a PEgRNA comprises three main component elements ordered in the 5′ to 3′ direction, namely: a spacer, a gRNA core, and an extension arm at the 3′ end. The extension arm may further be divided into the following structural elements in the 5′ to 3′ direction, namely: a homology arm, an editing template, and a primer binding site. In addition, the PEgRNA may comprise an optional 3′ end modifier region (e1) and an optional 5′ end modifier region (e2). Still further, the PEgRNA may comprise a transcriptional termination signal at the 3′ end of the PEgRNA (not depicted). These structural elements are further defined herein. The depiction of the structure of the PEgRNA is not meant to be limiting and embraces variations in the arrangement of the elements. For example, the optional sequence modifiers (e1) and (e2) could be positioned within or between any of the other regions shown, and not limited to being located at the 3′ and 5′ ends.

[0665] In some embodiments, a PEgRNA contemplated herein and may be designed in accordance with the methodology defined in Example 2. The PEgRNA comprises three main component elements ordered in the 5′ to 3′ direction, namely: a spacer, a gRNA core, and an extension arm at the 3′ end. The extension arm may further be divided into the following structural elements in the 5′ to 3′ direction, namely: a homology arm, an editing template, and a primer binding site. In addition, the PEgRNA may comprise an optional 3′ end modifier region (e1) and an optional 5′ end modifier region (e2). Still further, the PEgRNA may comprise a transcriptional termination signal on the 3′ end of the PEgRNA (not depicted). These structural elements are further defined herein. The depiction of the structure of the PEgRNA is not meant to be limiting and embraces variations in the arrangement of the elements. For example, the optional sequence modifiers (e1) and (e2) could be positioned within or between any of the other regions shown, and not limited to being located at the 3′ and 5′ ends.

### PEgRNA Improvements

[0666] The PEgRNAs may also include additional design improvements that may modify the properties and/or characteristics of PEgRNAs thereby improving the efficacy of prime editing. In various embodiments, these improvements may belong to one or more of a number of different categories, including but not limited to: (1) designs to enable efficient expression of functional PEgRNAs from non-polymerase III (pol III) promoters, which would enable the expression of longer PEgRNAs without burdensome sequence requirements; (2) improvements to the core, Cas9-binding PEgRNA scaffold, which could improve efficacy; (3) modifications to the PEgRNA to improve RT processivity, enabling the insertion of longer sequences at targeted genomic loci; and (4) addition of RNA motifs to the 5′ or 3′ termini of the PEgRNA that improve PEgRNA stability, enhance RT processivity, prevent misfolding of the PEgRNA, or recruit additional factors important for genome editing.

[0667] In one embodiment, PEgRNA could be designed with polIII promoters to improve the expression of longer-length PEgRNA with larger extension arms. sgRNAs are typically expressed from the U6 snRNA promoter. This promoter recruits pol III to express the associated RNA and is useful for expression of short RNAs that are retained within the nucleus. However, pol III is not highly processive and is unable to express RNAs longer than a few hundred nucleotides in length at the levels required for efficient genome editing. Additionally, pol III can stall or terminate at stretches of U's, potentially limiting the sequence diversity that could be inserted using a PEgRNA. Other promoters that recruit polymerase II (such as pCMV) or polymerase I (such as the U1 snRNA promoter) have been examined for their ability to express longer sgRNAs. However, these promoters are typically partially transcribed, which would result in extra sequence 5′ of the spacer in the expressed PEgRNA, which has been shown to result in markedly reduced Cas9:sgRNA activity in a site-dependent manner. Additionally, while pol III-transcribed PEgRNAs can simply terminate in a run of 6-7 U's, PEgRNAs transcribed from pol II or pol I would require a different termination signal. Often such signals also result in polyadenylation, which would result in undesired transport of the PEgRNA from the nucleus. Similarly, RNAs expressed from pol II promoters such as pCMV are typically 5′-capped, also resulting in their nuclear export.

[0668] Previously, Rinn and coworkers screened a variety of expression platforms for the production of long-noncoding RNA-(lncRNA) tagged sgRNAs¹⁸³. These platforms include RNAs expressed from pCMV and that terminate in the ENE element from the MALAT1 ncRNA from humans¹⁸⁴, the PAN ENE element from KSHV¹⁸, or the 3′ box from U1 snRNA¹⁸⁶. Notably, the MALAT1 ncRNA and PAN ENEs form triple helices protecting the polyA-tail^{184, 187}. These constructs could also enhance RNA stability. It is contemplated that these expression systems will also enable the expression of longer PEgRNAs.

[0669] In addition, a series of methods have been designed for the cleavage of the portion of the pol II promoter that would be transcribed as part of the PEgRNA, adding either a self-cleaving ribozyme such as the hammerhead¹⁸⁸, pistol¹⁸⁹, hatchet¹⁸⁹, hairpin¹⁹⁰, VS¹⁹¹, twister¹⁹², or twister sister¹⁹² ribozymes, or other self-cleaving elements to process the transcribed guide, or a hairpin that is recognized by Csy4¹⁹³ and also leads to processing of the guide. Also, it is hypothesized that incorporation of multiple ENE motifs could lead to improved PEgRNA expression and stability, as previously demonstrated for the KSHV PAN RNA and element¹⁸⁵. It is also anticipated that circularizing the PEgRNA in the form of a circular intronic RNA (ciRNA) could also lead to enhanced RNA expression and stability, as well as nuclear localization¹⁹⁴.

[0670] In various embodiments, the PEgRNA may include various above elements, as exemplified by the following sequence.

Non-limiting example 1-PERNA expression
platform consisting of pCMV, Csy4
hairpin, the PEgRNA, and MALATI ENE
(SEQ ID NO: 192)
TAGTTATTAATAGTAATCAATTACGGGGTCATTAGTTCATAGCCC
ATATATGGAGTTCCGCGTTACATAACTTACGGTAAATGGCCCGCC
TGGCTGACCGCCCAACGACCCCCGCCCATTGACGTCAATAATGAC
GTATGTTCCCATAGTAACGCCAATAGGGACTTTCCATTGACGTCA
ATGGGTGGAGTATTTACGGTAAACTGCCCACTTGGCAGTACATCA
AGTGTATCATATGCCAAGTACGCCCCCTATTGACGTCAATGACGG
TAAATGGCCCGCCTGGCATTATGCCCAGTACATGACCTTATGGGA
CTTTCCTACTTGGCAGTACATCTACGTATTAGTCATCGCTATTAC
CATGGTGATGCGGTTTTGGCAGTACATCAATGGGCGTGGATAGCG
GTTTGACTCACGGGGATTTCCAAGTCTCCACCCCATTGACGTCAA
TGGGAGTTTGTTTTGGCACCAAAATCAACGGGACTTTCCAAAATG
TCGTAACAACTCCGCCCCATTGACGCAAATGGGCGGTAGGCGTGT
ACGGTGGGAGGTCTATATAAGCAGAGCTGGTTTAGTGAACCGTCA
GATCGTTCACTGCCGTATAGGCAGGGCCCAGACTGAGCACGTGAG
TTTTAGAGCTAGAAATAGCAAGTTAAAATAAGGCTAGTCCGTTAT
CAACTTGAAAAAGTGGGACCGAGTCGGTCCTCTGCCATCAAAGCG
TGCTCAGTCTGTTTTAGGGTCATGAAGGTTTTTCTTTTCCTGAGA
AAACAACACGTATTGTTTTCTCAGGTTTTGCTTTTTGGCCTTTTT
CTAGCTTAAAAAAAAAAAAAGCAAAAGATGCTGGTGGTTGGCACT
CCTGGTTTCCAGGACGGGGTTCAAATCCCTGCGGCGTCTTTGCTT
TGACT
Non-limiting example 2-PEgRNA expression
platform consisting of pCMV, Csy4
hairpin, the PEgRNA, and PAN ENE
(SEQ ID NO: 193)
TAGTTATTAATAGTAATCAATTACGGGGTCATTAGTTCATAGCCCA
TATATGGAGTTCCGCGTTACATAACTTACGGTAAATGGCCCGCCT
GGCTGACCGCCCAACGACCCCCGCCCATTGACGTCAATAATGACG
TATGTTCCCATAGTAACGCCAATAGGGACTTTCCATTGACGTCAA
TGGGTGGAGTATTTACGGTAAACTGCCCACTTGGCAGTACATCAA
GTGTATCATATGCCAAGTACGCCCCCTATTGACGTCAATGACGGT
AAATGGCCCGCCTGGCATTATGCCCAGTACATGACCTTATGGGAC
TTTCCTACTTGGCAGTACATCTACGTATTAGTCATCGCTATTACC
ATGGTGATGCGGTTTTGGCAGTACATCAATGGGCGTGGATAGCGG
TTTGACTCACGGGGATTTCCAAGTCTCCACCCCATTGACGTCAAT
GGGAGTTTGTTTTGGCACCAAAATCAACGGGACTTTCCAAAATGT
CGTAACAACTCCGCCCCATTGACGCAAATGGGCGGTAGGCGTGTA
CGGTGGGAGGTCTATATAAGCAGAGCTGGTTTAGTGAACCGTCAG
ATCGTTCACTGCCGTATAGGCAGGGCCCAGACTGAGCACGTGAGT
TTTAGAGCTAGAAATAGCAAGTTAAAATAAGGCTAGTCCGTTATC
AACTTGAAAAAGTGGGACCGAGTCGGTCCTCTGCCATCAAAGCGT
GCTCAGTCTGTTTTGTTTTGGCTGGGTTTTTCCTTGTTCGCACCG
GACACCTCCAGTGACCAGACGGCAAGGTTTTTATCCCAGTGTATA
TTGGAAAAACATGTTATACTTTTGACAATTTAACGTGCCTAGAGC
TCAAATTAAACTAATACCATAACGTAATGCAACTTACAACATAAA
TAAAGGTCAATGTTTAATCCATAAAAAAAAAAAAAAAAAAA
Non-limiting example 3-PBgRNA expression
platform consisting of pCMV, Csy4
hairpin, the PEgRNA, and 3xPAN ENE
(SEQ ID NO: 194)
TAGTTATTAATAGTAATCAATTACGGGGTCATTAGTTCATAGCCC
ATATATGGAGTTCCGCGTTACATAACTTACGGTAAATGGCCCGCC
TGGCTGACCGCCCAACGACCCCCGCCCATTGACGTCAATAATGAC
GTATGTTCCCATAGTAACGCCAATAGGGACTTTCCATTGACGTCA
ATGGGTGGAGTATTTACGGTAAACTGCCCACTTGGCAGTACATCA
AGTGTATCATATGCCAAGTACGCCCCCTATTGACGTCAATGACGG
TAAATGGCCCGCCTGGCATTATGCCCAGTACATGACCTTATGGGA
CTTTCCTACTTGGCAGTACATCTACGTATTAGTCATCGCTATTAC
CATGGTGATGCGGTTTTGGCAGTACATCAATGGGCGTGGATAGCG
GTTTGACTCACGGGGATTTCCAAGTCTCCACCCCATTGACGTCAA
TGGGAGTTTGTTTTGGCACCAAAATCAACGGGACTTTCCAAAATG
TCGTAACAACTCCGCCCCATTGACGCAAATGGGCGGTAGGCGTGT
ACGGTGGGAGGTCTATATAAGCAGAGCTGGTTTAGTGAACCGTCA
GATCGTTCACTGCCGTATAGGCAGGGCCCAGACTGAGCACGTGAG
TTTTAGAGCTAGAAATAGCAAGTTAAAATAAGGCTAGTCCGTTAT
CAACTTGAAAAAGTGGGACCGAGTCGGTCCTCTGCCATCAAAGCG
TGCTCAGTCTGTTTTGTTTTGGCTGGGTTTTTCCTTGTTCGCACC
GGACACCTCCAGTGACCAGACGGCAAGGTTTTTATCCCAGTGTAT
ATTGGAAAAACATGTTATACTTTTGACAATTTAACGTGCCTAGAG
CTCAAATTAAACTAATACCATAACGTAATGCAACTTACAACATAA
ATAAAGGTCAATGTTTAATCCATAAAAAAAAAAAAAAAAAAAACA
CACTGTTTTGGCTGGGTTTTTCCTTGTTCGCACCGGACACCTCCA
GTGACCAGACGGCAAGGTTTTTATCCCAGTGTATATTGGAAAAAC
ATGTTATACTTTTGACAATTTAACGTGCCTAGAGCTCAAATTAAA
CTAATACCATAACGTAATGCAACTTACAACATAAATAAAGGTCAA
TGTTTAATCCATAAAAAAAAAAAAAAAAAAATCTCTCTGTTTTGG
CTGGGTTTTTCCTTGTTCGCACCGGACACCTCCAGTGACCAGACG
GCAAGGTTTTTATCCCAGTGTATATTGGAAAAACATGTTATACTT
TTGACAATTTAACGTGCCTAGAGCTCAAATTAAACTAATACCATA
ACGTAATGCAACTTACAACATAAATAAAGGTCAATGTTTAATCCA
TAAAAAAAAAAAAAAAAAAA
Non-limiting example 4-PEgRNA expression
platform consisting of pCMV, Csy4
hairpin, the PEgRNA, and 3′ box
(SEQ ID NO: 195)
TAGTTATTAATAGTAATCAATTACGGGGTCATTAGTTCATAGCCC
ATATATGGAGTTCCGCGTTACATAACTTACGGTAAATGGCCCGCC
TGGCTGACCGCCCAACGACCCCCGCCCATTGACGTCAATAATGAC
GTATGTTCCCATAGTAACGCCAATAGGGACTTTCCATTGACGTCA
ATGGGTGGAGTATTTACGGTAAACTGCCCACTTGGCAGTACATCA
AGTGTATCATATGCCAAGTACGCCCCCTATTGACGTCAATGACGG
TAAATGGCCCGCCTGGCATTATGCCCAGTACATGACCTTATGGGA
CTTTCCTACTTGGCAGTACATCTACGTATTAGTCATCGCTATTAC
CATGGTGATGCGGTTTTGGCAGTACATCAATGGGCGTGGATAGCG
GTTTGACTCACGGGGATTTCCAAGTCTCCACCCCATTGACGTCAA
TGGGAGTTTGTTTTGGCACCAAAATCAACGGGACTTTCCAAAATG
TCGTAACAACTCCGCCCCATTGACGCAAATGGGCGGTAGGCGTGT
ACGGTGGGAGGTCTATATAAGCAGAGCTGGTTTAGTGAACCGTCA
GATCGTTCACTGCCGTATAGGCAGGGCCCAGACTGAGCACGTGAG
TTTTAGAGCTAGAAATAGCAAGTTAAAATAAGGCTAGTCCGTTAT
CAACTTGAAAAAGTGGGACCGAGTCGGTCCTCTGCCATCAAAGCG
TGCTCAGTCTGTTTGTTTCAAAAGTAGACTGTACGCTAAGGGTCA
TATCTTTTTTTGTTTGGTTTGTGTCTTGGTTGGCGTCTTAAA
Non-limiting example 5-PEgRNA expression
platform consisting of pU1, Csy4 hairpin,
the PEgRNA, and 3′ box
(SEQ ID NO: 196)
CTAAGGACCAGCTTCTTTGGGAGAGAACAGACGCAGGGGGGGGAG
GGAAAAAGGGAGAGGCAGACGTCACTTCCCCTTGGCGGCTCTGGC
AGCAGATTGGTCGGTTGAGTGGCAGAAAGGCAGACGGGGACTGGG
CAAGGCACTGTCGGTGACATCACGGACAGGGCGACTTCTATGTAG
ATGAGGCAGCGCAGAGGCTGCTGCTTCGCCACTTGCTGCTTCACC
ACGAAGGAGTTCCCGTGCCCTGGGAGCGGGTTCAGGACCGCTGAT
CGGAAGTGAGAATCCCAGCTGTGTGTCAGGGCTGGAAAGGGCTCG
GGAGTGCGCGGGGCAAGTGACCGTGTGTGTAAAGAGTGAGGCGTA
TGAGGCTGTGTCGGGGCAGAGGCCCAAGATCTCAGTTCACTGCCG
TATAGGCAGGGCCCAGACTGAGCACGTGAGTTTTAGAGCTAGAAA
TAGCAAGTTAAAATAAGGCTAGTCCGTTATCAACTTGAAAAAGTG
GGACCGAGTCGGTCCTCTGCCATCAAAGCGTGCTCAGTCTGTTTC
AGCAAGTTCAGAGAAATCTGAACTTGCTGGATTTTTGGAGCAGGG
AGATGGAATAGGAGCTTGCTCCGTCCACTCCACGCATCGACCTGG
TATTGCAGTACCTCCAGGAACGGTGCACCCACTTTCTGGAGTTTC
AAAAGTAGACTGTACGCTAAGGGTCATATCTTTTTTTGTTTGGTT
TGTGTCTTGGTTGGCGTCTTAAA.

[0671] In various other embodiments, the PEgRNA may be improved by introducing improvements to the scaffold or core sequences. This can be done by introducing known The core, Cas9-binding PEgRNA scaffold can likely be improved to enhance PE activity. Several such approaches have already been demonstrated. For instance, the first pairing element of the scaffold (P1) contains a GTTTT-AAAAC (SEQ ID NO: 68) pairing element. Such runs of Ts have been shown to result in pol IU pausing and premature termination of the RNA transcript. Rational mutation of one of the TA pairs to a G-C pair in this portion of P1 has been shown to enhance sgRNA activity, suggesting this approach would also be feasible for PEgRNAs¹⁹⁵. Additionally, increasing the length of P1 has also been shown to enhance sgRNA folding and lead to improved activity¹⁹⁵, suggesting it as another avenue for the improvement of PEgRNA activity. Example improvements to the core can include:

PEgRNA containing a 6 nt extension to P1
(SEQ ID NO: 197)
GGCCCAGACTGAGCACGTGAGTTTTAGAGCTAGCTCATGAAAATG
AGCTAGCAAGTTAAAATAAGGCTAGTCCGTTATCAACTTGAAAAA
GTGGGACCGAGTCGGTCCTCTGCCATCAAAGCGTGCTCAGTCTGT
TTTTTT
PEgRNA containing a T-A to G-C mutation
within P1
(SEQ ID NO: 198)
GGCCCAGACTGAGCACGTGAGTTTGAGAGCTAGAAATAGCAAGTT
TAAATAAGGCTAGTCCGTTATCAACTTGAAAAAGTGGGACCGAGT
CGGTCCTCTGCCATCAAAGCGTGCTCAGTCTGTTTTTTT

[0672] In various other embodiments, the PEgRNA may be improved by introducing modifications to the edit template region. As the size of the insertion templated by the PEgRNA increases, it is more likely to be degraded by endonucleases, undergo spontaneous hydrolysis, or fold into secondary structures unable to be reverse-transcribed by the RT or that disrupt folding of the PEgRNA scaffold and subsequent Cas9-RT binding. Accordingly, it is likely that modification to the template of the PEgRNA might be necessary to affect large insertions, such as the insertion of whole genes. Some strategies to do so include the incorporation of modified nucleotides within a synthetic or semi-synthetic PEgRNA that render the RNA more resistant to degradation or hydrolysis or less likely to adopt inhibitory secondary structures¹⁹⁶. Such modifications could include 8-aza-7-deazaguanosine, which would reduce RNA secondary structure in G-rich sequences; locked-nucleic acids (LNA) that reduce degradation and enhance certain kinds of RNA secondary structure; 2′-O-methyl, 2′-fluoro, or 2′-O-methoxyethoxy modifications that enhance RNA stability. Such modifications could also be included elsewhere in the PEgRNA to enhance stability and activity. Alternatively or additionally, the template of the PEgRNA could be designed such that it both encodes for a desired protein product and is also more likely to adopt simple secondary structures that are able to be unfolded by the RT. Such simple structures would act as a thermodynamic sink, making it less likely that more complicated structures that would prevent reverse transcription would occur. Finally, one could also split the template into two, separate PEgRNAs. In such a design, a PE would be used to initiate transcription and also recruit a separate template RNA to the targeted site via an RNA-binding protein fused to Cas9 or an RNA recognition element on the PEgRNA itself such as the MS2 aptamer. The RT could either directly bind to this separate template RNA, or initiate reverse transcription on the original PEgRNA before swapping to the second template. Such an approach could enable long insertions by both preventing misfolding of the PEgRNA upon addition of the long template and also by not requiring dissociation of Cas9 from the genome for long insertions to occur, which could possibly be inhibiting PE-based long insertions.

[0673] In still other embodiments, the PEgRNA may be improved by introducing additional RNA motifs at the 5′ and 3′ termini of the PEgRNAs, or even at positions therein between (e.g., in the gRNA core region, or the spacer). Several such motifs—such as the PAN ENE from KSHV and the ENE from MALAT1 were discussed above as possible means to terminate expression of longer PEgRNAs from non-pol III promoters. These elements form RNA triple helices that engulf the polyA tail, resulting in their being retained within the nucleus^{184, 187}. However, by forming complex structures at the 3′ terminus of the PEgRNA that occlude the terminal nucleotide, these structures would also likely help prevent exonuclease-mediated degradation of PEgRNAs.

[0674] Other structural elements inserted at the 3′ terminus could also enhance RNA stability, albeit without enabling termination from non-pol III promoters. Such motifs could include hairpins or RNA quadruplexes that would occlude the 3′ terminus¹⁹⁷, or self-cleaving ribozymes such as HDV that would result in the formation of a 2′-3′-cyclic phosphate at the 3′ terminus and also potentially render the PEgRNA less likely to be degraded by exonucleases¹⁹⁸. Inducing the PEgRNA to cyclize via incomplete splicing—to form a ciRNA—could also increase PEgRNA stability and result in the PEgRNA being retained within the nucleus¹⁹⁴.

[0675] Additional RNA motifs could also improve RT processivity or enhance PEgRNA activity by enhancing RT binding to the DNA-RNA duplex. Addition of the native sequence bound by the RT in its cognate retroviral genome could enhance RT activity¹⁹⁹. This could include the native primer binding site (PBS), polypurine tract (PPT), or kissing loops involved in retroviral genome dimerization and initiation of transcription¹⁹⁹.

[0676] Addition of dimerization motifs—such as kissing loops or a GNRA tetraloop/tetraloop receptor pair²⁰⁰—at the 5′ and 3′ termini of the PEgRNA could also result in effective circularization of the PEgRNA, improving stability. Additionally, it is envisioned that addition of these motifs could enable the physical separation of the PEgRNA spacer and primer binding site, preventing occlusion of the spacer which would hinder PE activity. Short 5′ extensions or 3′ extensions to the PEgRNA that form a small toehold hairpin in the spacer region or along the primer binding site could also compete favorably against the annealing of intracomplementary regions along the length of the PEgRNA, e.g., the interaction between the spacer and the primer binding site that can occur. Finally, kissing loops could also be used to recruit other template RNAs to the genomic site and enable swapping of RT activity from one RNA to the other. A number secondary RNA structures that may be engineered into any region of the PEgRNA, including in the terminal portions of the extension arm (i.e., eland e2), as shown. Example improvements include, but are not limited to:

PEgRNA-HDV fusion
(SEQ ID) NO: 199)
GGCCCAGACTGAGCACGTGAGTTTTAGAGCTAGAAATAGCAAGTT
AAAATAAGGCTAGTCCGTTATCAACTTGAAAAAGTGGGACCGAGT
CGGTCCTCTGCCATCAAAGCGTGCTCAGTCTGGGCCGGCATGGTC
CCAGCCTCCTCGCTGGCGCCGGCTGGGCAACATGCTTCGGCATGG
CGAATGGGACTTTTTTT
PEgRNA-MMLV kissing loop
(SEQ ID NO: 200)
GGTGGGAGACGTCCCACCGGCCCAGACTGAGCACGTGAGTTTTAG
AGCTAGAAATAGCAAGTTAAAATAAGGCTAGTCCGTTATCAACTT
GAAAAAGTGGGACCGAGTCGGTCCTCTGCCATCAAAGCTTCGACC
GTGCTCAGTCTGGTGGGAGACGTCCCACCTTTTTTT
PEgRNA-VS ribozyme kissing loop
(SEQ ID NO: 201)
GAGCAGCATGGCGTCGCTGCTCACGGCCCAGACTGAGCACGTGAG
TTTTAGAGCTAGAAATAGCAAGTTAAAATAAGGCTAGTCCGTTAT
CAACTTGAAAAAGTGGGACCGAGTCGGTCCTCTGCCATCAAAGCT
TCGACCGTGCTCAGTCTCCATCAGTTGACACCCTGAGGTTTTTTT
PEgRNA-GNRA tetraloop/tetraloop receptor
(SEQ ID NO: 202)
GCAGACCTAAGTGGUGACATATGGTCTGGGCCCAGACTGAGCACG
TGAGTTTTAGAGCTAUACGTAGCAAGTTAAAATAAGGCTAGTCCG
TTATCAACTTUACGAAGTGGGACCGAGTCGGTCCTCTGCCATCAA
AGCTTCGACCGTGCTCAGTCTGCATGCGATTAGAAATAATCGCAT
GTTTTTTT
PEgRNA template switching secondary RNA-
HDV fusion
(SEQ ID NO: 203)
TCTGCCATCAAAGCTGCGACCGTGCTCAGTCTGGTGGGAGACGTC
CCACCGGCCGGCATGGTCCCAGCCTCCTCGCTGGCGCCGGCTGGG
CAACATGCTTCGGCATGGCGAATGGGACTTTTTTT

[0677] PEgRNA scaffolds could be further improved via directed evolution, in an analogous fashion to how SpCas9 and prime editors (PE) have been improved. Directed evolution could enhance PEgRNA recognition by Cas9 or evolved Cas9 variants. Additionally, it is likely that different PEgRNA scaffold sequences would be optimal at different genomic loci, either enhancing PE activity at the site in question, reducing off-target activities, or both. Finally, evolution of PEgRNA scaffolds to which other RNA motifs have been added would almost certainly improve the activity of the fused PEgRNA relative to the unevolved, fusion RNA. For instance, evolution of allosteric ribozymes composed of c-di-GMP-I aptamers and hammerhead ribozymes led to dramatically improved activity²⁰², suggesting that evolution would improve the activity of hammerhead-PEgRNA fusions as well. In addition, while Cas9 currently does not generally tolerate 5′ extension of the sgRNA, directed evolution will likely generate enabling mutations that mitigate this intolerance, allowing additional RNA motifs to be utilized. The present disclosure contemplates any such ways to further improve the efficacy of the prime editing systems utilized in the methods and compositions disclosed here.

[0678] In various embodiments, it may be advantageous to limit the appearance of consecutive sequence of Ts from the extension arm as consecutive series of T's may limit the capacity of the PEgRNA to be transcribed. For example, strings of at least consecutive three T's, at least consecutive four T's, at least consecutive five T's, at least consecutive six T's, at least consecutive seven T's, at least consecutive eight T's, at least consecutive nine T's, at least consecutive ten T's, at least consecutive eleven T's, at least consecutive twelve T's, at least consecutive thirteen T's, at least consecutive fourteen T's, or at least consecutive fifteen T's should be avoided when designing the PEgRNA, or should be at least removed from the final designed sequence. In one embodiment, one can avoid the includes of unwanted strings of consecutive T's in PEgRNA extension arms but avoiding target sites that are rich in consecutive A:T nucleobase pairs.

### PEgRNAs for Evading MMR

[0679] The present disclosure also provides novel pegRNAs for use in prime editing. As discussed above, prime editing using pegRNAs having DNA synthesis templates that comprise three or more consecutive nucleotide mismatches relative to a target site sequence can evade correction by the MMR pathway, resulting in an increase in prime editing efficiency and/or a decrease in the frequency of indel formation compared to the introduction of a single nucleotide mismatch using prime editing. Thus, the present disclosure provides pegRNAs useful for introducing modifications into a target nucleic acid with increased prime editing efficiency and/or decreased indel frequency compared to a corresponding control pegRNA that does not contain three or more consecutive nucleotide mismatches relative to the target site sequence.

[0680] The pegRNAs provided by the present disclosure are useful for editing a nucleic acid molecule by prime editing while improving prime editing efficiency and/or reducing indel formation. Without wishing to be bound by theory, the pegRNAs provided in the present disclosure may evade or reduce the impact of cellular MMR correction of mismatches at the target site that are introduced by the nucleotide alteration(s) through prime editing. In some embodiments, the extension arm of the pegRNAs provided by the present disclosure comprise three or more consecutive nucleotide mismatches relative to a target site on the nucleic acid molecule. In some embodiments, the DNA synthesis template of the pegRNA comprises three or more consecutive nucleotide mismatches relative to the target site on the nucleic acid molecule. In some embodiments, at least one of the three or more consecutive nucleotide mismatches introduces a silent mutation. In some embodiments, at least one of the consecutive nucleotide mismatches results in an alteration in the amino acid sequence of a protein expressed from the target nucleic acid molecule, while at least one of the remaining nucleotide mismatches is a silent mutation. The silent mutations may be introduced in coding regions of the target nucleic acid molecule or in non-coding regions of the target nucleic acid molecule. When the silent mutations are introduced in a coding region, they may introduce into the nucleic acid molecule one or more alternate codons encoding the same amino acid as the unedited nucleic acid molecule. When the silent mutations are introduced in a non-coding region, they may be present in a region of the nucleic acid molecule that does not influence splicing, gene regulation, RNA lifetime, or other biological properties of the target site on the nucleic acid molecule.

[0681] Any number of consecutive nucleotide mismatches of three or more can be incorporated into the extension arm of the pegRNAs described herein to achieve the benefits of avoiding or reducing the impact of correction by the cellular MMR pathway. In some embodiments, the DNA synthesis template of the extension arm on the pegRNA comprises three or more, four or more, five or more, six or more, seven or more, eight or more, nine or more, or ten or more consecutive nucleotide mismatches relative to a target site on the nucleic acid molecule.

[0682] Any number of consecutive nucleotide mismatches of three or more can be incorporated into the extension arm of the pegRNAs described herein to achieve the benefits of evading correction by the MMR pathway, thereby increasing editing efficiency and/or reducing unintended indels. In some embodiments, the DNA synthesis template of the extension arm on the pegRNA comprises three consecutive nucleotide mismatches relative to the endogenous sequence of a target site on the nucleic acid molecule edited by prime editing. In some embodiments, the DNA synthesis template of the extension arm on the pegRNA comprises 3-5 consecutive nucleotide mismatches relative to the endogenous sequence of a target site on the nucleic acid molecule edited by prime editing. In some embodiments, the DNA synthesis template of the extension arm on the pegRNA comprises 6-10 consecutive nucleotide mismatches relative to the endogenous sequence of a target site on the nucleic acid molecule edited by prime editing. In some embodiments, the DNA synthesis template of the extension arm on the pegRNA comprises 11-20 consecutive nucleotide mismatches relative to the endogenous sequence of a target site on the nucleic acid molecule edited by prime editing. In some embodiments, the DNA synthesis template of the extension arm on the pegRNA comprises 20-25 consecutive nucleotide mismatches relative to the endogenous sequence of a target site on the nucleic acid molecule edited by prime editing. In some embodiments, the DNA synthesis template of the extension arm on the pegRNA comprises 3, 4, 5, 6, 7, 8, 9, 10, 11, 12, 13, 14, 15, 16, 17, 18, 19, 20, 21, 22, 23, 24, or 25 consecutive nucleotide mismatches relative to the endogenous sequence of a target site on the nucleic acid molecule edited by prime editing. In some embodiments, the DNA synthesis template of the extension arm on the pegRNA comprises three or more, four or more, five or more, six or more, seven or more, eight or more, nine or more, or ten or more consecutive nucleotide mismatches relative to the endogenous sequence of a target site on the nucleic acid molecule edited by prime editing.

### Kits

[0683] The compositions of the present disclosure may be assembled into kits. In some embodiments, the kit comprises nucleic acid vectors for the expression of a prime editor and an MMR inhibitor, such as, but not limited to an MLH1 dominant negative variant as described herein. In other embodiments, the kit further comprises appropriate guide nucleotide sequences (e.g., PEgRNAs and second-site gRNAs) or nucleic acid vectors for the expression of such guide nucleotide sequences, to target the Cas9 protein or prime editor to the desired target sequence.

[0684] The kit described herein may include one or more containers housing components for performing the methods described herein and optionally instructions for use. Any of the kit described herein may further comprise components needed for performing the assay methods. Each component of the kits, where applicable, may be provided in liquid form (e.g., in solution) or in solid form, (e.g., a dry powder). In certain cases, some of the components may be reconstitutable or otherwise processible (e.g., to an active form), for example, by the addition of a suitable solvent or other species (for example, water), which may or may not be provided with the kit.

[0685] In some embodiments, the kits may optionally include instructions and/or promotion for use of the components provided. As used herein, “instructions” can define a component of instruction and/or promotion, and typically involve written instructions on or associated with packaging of the disclosure. Instructions also can include any oral or electronic instructions provided in any manner such that a user will clearly recognize that the instructions are to be associated with the kit, for example, audiovisual (e.g., videotape, DVD, etc.), Internet, and/or web-based communications, etc. The written instructions may be in a form prescribed by a governmental agency regulating the manufacture, use, or sale of pharmaceuticals or biological products, which can also reflect approval by the agency of manufacture, use or sale for animal administration. As used herein, “promoted” includes all methods of doing business including methods of education, hospital and other clinical instruction, scientific inquiry, drug discovery or development, academic research, pharmaceutical industry activity including pharmaceutical sales, and any advertising or other promotional activity including written, oral and electronic communication of any form, associated with the disclosure. Additionally, the kits may include other components depending on the specific application, as described herein.

[0686] The kits may contain any one or more of the components described herein in one or more containers. The components may be prepared sterilely, packaged in a syringe and shipped refrigerated. Alternatively, it may be housed in a vial or other container for storage. A second container may have other components prepared sterilely. Alternatively, the kits may include the active agents premixed and shipped in a vial, tube, or other container.

[0687] The kits may have a variety of forms, such as a blister pouch, a shrink wrapped pouch, a vacuum scalable pouch, a sealable thermoformed tray, or a similar pouch or tray form, with the accessories loosely packed within the pouch, one or more tubes, containers, a box or a bag. The kits may be sterilized after the accessories are added, thereby allowing the individual accessories in the container to be otherwise unwrapped. The kits can be sterilized using any appropriate sterilization techniques, such as radiation sterilization, heat sterilization, or other sterilization methods known in the art. The kits may also include other components, depending on the specific application, for example, containers, cell media, salts, buffers, reagents, syringes, needles, a fabric, such as gauze, for applying or removing a disinfecting agent, disposable gloves, a support for the agents prior to administration, etc. Some aspects of this disclosure provide kits comprising a nucleic acid construct comprising a nucleotide sequence encoding the various components of the prime editing system utilized in the methods and compositions described herein (e.g., including, but not limited to, the napDNAbps, reverse transcriptases, polymerases, fusion proteins (e.g., comprising napDNAbps and reverse transcriptases (or more broadly, polymerases), extended guide RNAs, and complexes comprising fusion proteins and extended guide RNAs, as well as accessory elements, such as second strand nicking components (e.g., second strand nicking gRNA) and 5′ endogenous DNA flap removal endonucleases for helping to drive the prime editing process towards the edited product formation). In some embodiments, the nucleotide sequence(s) comprises a heterologous promoter (or more than a single promoter) that drives expression of the prime editing system components.

[0688] Other aspects of this disclosure provide kits comprising one or more nucleic acid constructs encoding the various components of the prime editing systems utilized in the methods and compositions described herein, e.g., the comprising a nucleotide sequence encoding the components of the prime editing system capable of modifying a target DNA sequence. In some embodiments, the nucleotide sequence comprises a heterologous promoter that drives expression of the prime editing system components.

[0689] Some aspects of this disclosure provides kits comprising a nucleic acid construct, comprising (a) a nucleotide sequence encoding a napDNAbp (e.g., a Cas9 domain) fused to a reverse transcriptase and (b) a heterologous promoter that drives expression of the sequence of (a).

### Cells

[0690] Cells that may contain any of the compositions described herein include prokaryotic cells and eukaryotic cells. The methods described herein are used to deliver a Cas9 protein or a prime editor and an MMR inhibitor (e.g., an MLH1 dominant negative variant) into a eukaryotic cell (e.g., a mammalian cell, such as a human cell). In some embodiments, the cell is in vitro (e.g., cultured cell. In some embodiments, the cell is in vivo (e.g., in a subject such as a human subject). In some embodiments, the cell is ex vivo (e.g., isolated from a subject and may be administered back to the same or a different subject).

[0691] Mammalian cells of the present disclosure include human cells, primate cells (e.g., vero cells), rat cells (e.g., GH3 cells, OC23 cells) or mouse cells (e.g., MC3T3 cells). There are a variety of human cell lines, including, without limitation, human embryonic kidney (HEK) cells, HeLa cells, cancer cells from the National Cancer Institute's 60 cancer cell lines (NCI60), DU145 (prostate cancer) cells, Lncap (prostate cancer) cells, MCF-7 (breast cancer) cells, MDA-MB-438 (breast cancer) cells, PC3 (prostate cancer) cells, T47D (breast cancer) cells, THP-1 (acute myeloid leukemia) cells, U87 (glioblastoma) cells. SHSY5Y human neuroblastoma cells (cloned from a myeloma) and Saos-2 (bone cancer) cells. In some embodiments, rAAV vectors are delivered into human embryonic kidney (HEK) cells (e.g., HEK 293 or HEK 293T cells). In some embodiments. rAAV vectors are delivered into stem cells (e.g., human stem cells) such as, for example, pluripotent stem cells (e.g., human pluripotent stem cells including human induced pluripotent stem cells (hiPSCs)). A stem cell refers to a cell with the ability to divide for indefinite periods in culture and to give rise to specialized cells. A pluripotent stem cell refers to a type of stem cell that is capable of differentiating into all tissues of an organism, but not alone capable of sustaining full organismal development. A human induced pluripotent stem cell refers to a somatic (e.g., mature or adult) cell that has been reprogrammed to an embryonic stem cell-like state by being forced to express genes and factors important for maintaining the defining properties of embryonic stem cells (see, e.g., Takahashi and Yamanaka, Cell 126 (4): 663-76, 2006, incorporated by reference herein). Human induced pluripotent stem cell cells express stem cell markers and are capable of generating cells characteristic of all three germ layers (ectoderm, endoderm, mesoderm).

[0692] Additional non-limiting examples of cell lines that may be used in accordance with the present disclosure include 293-T, 293-T, 3T3, 4T1, 721, 9L, A-549, A172, A20, A253, A2780, A2780ADR, A2780cis, A431, ALC, B16, B35, BCP-1, BEAS-2B, bEnd.3, BHK-21, BR 293, BxPC3, C2C12, C3H-10T1/2, C6, C6/36, Cal-27, CGR8, CHO, CML T1, CMT, COR-L23, COR-L23/5010, COR-L23/CPR, COR-L23/R23, COS-7, COV-434, CT26, D17, DH82, DU145, DuCaP, E14Tg2a, EL4, EM2, EM3, EMT6/AR 1, EMT6/AR 10.0, FM3, H1299, H69, HB54. HB55, HCA2, Hepalclc7, High Five cells, HL-60, HMEC, HT-29, HUVEC, J558L cells, Jurkat, JY cells, K562 cells, KCL22, KG1, Ku812, KYO1, LNCap, Ma-Mel 1, 2, 3, . . . 48, MC-38, MCF-10A, MCF-7, MDA-MB-231, MDA-MB-435, MDA-MB-468, MDCK II, MG63, MONO-MAC 6, MOR/0.2R, MRC5, MTD-1A, MyEnd, NALM-1, NCI-H69/CPR, NCI-H69/LX10, NCI-H69/LX20, NCI-H69/LX4, NIH-3T3, NW-145, OPCN/OPCT Peer, PNT-1A/PNT 2, PTK2, Raji, RBL cells, RenCa, RIN-5F, RMA/RMAS, S2, Saos-2 cells, Sf21, Sf9, SiHa, SKBR3, SKOV-3, T-47D, T2, T84, TIHP1, U373, U87, U937, VCaP, WM39, WT-49, X63, YAC-1 and YAR cells.

[0693] Some aspects of this disclosure provide cells comprising any of the constructs disclosed herein. In some embodiments, a host cell is transiently or non-transiently transfected with one or more vectors described herein. In some embodiments, a cell is transfected ex vivo. In some embodiments, a cell is transfected in vivo. In some embodiments, a cell that is transfected is taken from a subject. In some embodiments, the cell is derived from cells taken from a subject, such as a cell line. A wide variety of cell lines for tissue culture are known in the art. Examples of cell lines include, but are not limited to, C8161, CCRF-CEM, MOLT, mIMCD-3, NHDF, HeLa-S3, Huh1, Huh4, Huh7, HUVEC, HASMC, HEKn, HEKa, MiaPaCell, Panc1, PC-3, TF1, CTLL-2, CIR, Rat6, CV1, RPTE, A 10, T24, J82, A375, ARH-77, Calul, SW480, SW620, SKOV3, SK-UT, CaCo2, P388D1, SEM-K2, WEHI-231, HB56, TIB55, Jurkat, J45.01, LRMB, Bcl-1, BC-3, IC21, DLD2, Raw264.7, NRK, NRK-52E, MRC5, MEF, Hep G2, HeLa B, HeLa T4, COS, COS-1, COS-6, COS-M6A, BS-C-1 monkey kidney epithelial, BALB/3T3 mouse embryo fibroblast, 3T3 Swiss, 3T3-L1, 132-d5 human fetal fibroblasts; 10.1 mouse fibroblasts, 293-T, 3T3, 721, 9L, A2780, A2780ADR, A2780cis, A 172, A20, A253, A431, A-549, ALC, B16, B35, BCP-1 cells, BEAS-2B, bEnd.3, BHK-21, BR 293, BxPC3, C3H-10T1/2, C6136, Cal-27, CHO, CHO-7, CHO-IR, CHO-K1, CHO-K2, CHO-T, CHO Dhfr −/−, COR-L23, COR-L23/CPR, COR-L2315010, COR-L23/R23, COS-7, COV-434, CML T1, CMT, CT26, D17, DH82, DU145, DuCaP, EL4, EM2, EM3, EMT6/AR 1, EMT6/AR 10.0, FM3, H1299, H69, HB54, HB55, HCA2, HEK-293, HeLa, Hepalclc7, HL-60, HMEC, HT-29, Jurkat, JY cells, K562 cells, Ku812, KCL22, KG1, KYO1, LNCap, Ma-Mel 1-48, MC-38, MCF-7, MCF-10A, MDA-MB-231, MDA-MB-468, MDA-MB-435, MDCK II, MDCK 11, MOR/0.2R, MONO-MAC 6, MTD-1A, MyEnd, NCI-H69/CPR, NCI-H69/LX10, NCI-H69/LX20, NCI-H69/LX4, NIH-3T3, NALM-1, NW-145, OPCN/OPCT cell lines, Peer, PNT-1A/PNT 2, RenCa, RIN-5F, RMA/RMAS, Saos-2 cells, Sf-9, SkBr3, T2, T-47D, T84, THP1 cell line, U373, U87, U937, VCaP, Vero cells, WM39, WT-49, X63, YAC-1, YAR, and transgenic varieties thereof.

[0694] Cell lines are available from a variety of sources known to those with skill in the art (see. e.g., the American Type Culture Collection (ATCC) (Manassas, Va.)). In some embodiments, a cell transfected with one or more vectors described herein is used to establish a new cell line comprising one or more vector-derived sequences. In some embodiments, a cell transiently transfected with the components of a CRISPR system as described herein (such as by transient transfection of one or more vectors, or transfection with RNA), and modified through the activity of a CRISPR complex, is used to establish a new cell line comprising cells containing the modification but lacking any other exogenous sequence. In some embodiments, cells transiently or non-transiently transfected with one or more vectors described herein, or cell lines derived from such cells are used in assessing one or more test compounds.

### Vectors

[0695] Some aspects of the present disclosure relate to using recombinant virus vectors (e.g., adeno-associated virus vectors, adenovirus vectors, or herpes simplex virus vectors) for the delivery of the prime editors and MLH1 dominant negative mutants as described herein into a cell. In the case of a split-PE approach, the N-terminal portion of a PE fusion protein and the C-terminal portion of a PE fusion are delivered by separate recombinant virus vectors (e.g., adeno-associated virus vectors, adenovirus vectors, or herpes simplex virus vectors) into the same cell, since the full-length Cas9 protein or prime editors exceeds the packaging limit of various virus vectors, e.g., rAAV (˜4.9 kb).

[0696] In some embodiments, the vectors used herein may encode the PE fusion proteins, or any of the components thereof (e.g., napDNAbp, linkers, or polymerases), or an MLH1 dominant negative mutant. In addition, the vectors used herein may encode the PEgRNAs, and/or the accessory gRNA for second strand nicking. The vectors may be capable of driving expression of one or more coding sequences in a cell. In some embodiments, the cell may be a prokaryotic cell, such as, e.g., a bacterial cell. In some embodiments, the cell may be a eukaryotic cell, such as, e.g., a yeast, plant, insect, or mammalian cell. In some embodiments, the eukaryotic cell may be a mammalian cell. In some embodiments, the eukaryotic cell may be a rodent cell. In some embodiments, the eukaryotic cell may be a human cell. Suitable promoters to drive expression in different types of cells are known in the art. In some embodiments, the promoter may be wild-type. In other embodiments, the promoter may be modified for more efficient or efficacious expression. In yet other embodiments, the promoter may be truncated yet retain its function. For example, the promoter may have a normal size or a reduced size that is suitable for proper packaging of the vector into a virus.

[0697] In some embodiments, the promoters that may be used in the prime editor vectors may be constitutive, inducible, or tissue-specific. In some embodiments, the promoters may be a constitutive promoters. Non-limiting exemplary constitutive promoters include cytomegalovirus immediate early promoter (CMV), simian virus (SV40) promoter, adenovirus major late (MLP) promoter, Rous sarcoma virus (RSV) promoter, mouse mammary tumor virus (MMTV) promoter, phosphoglycerate kinase (PGK) promoter, elongation factor-alpha (EFla) promoter, ubiquitin promoters, actin promoters, tubulin promoters, immunoglobulin promoters, a functional fragment thereof, or a combination of any of the foregoing. In some embodiments, the promoter may be a CMV promoter. In some embodiments, the promoter may be a truncated CMV promoter. In other embodiments, the promoter may be an EFla promoter. In some embodiments, the promoter may be an inducible promoter. Non-limiting exemplary inducible promoters include those inducible by heat shock, light, chemicals, peptides, metals, steroids, antibiotics, or alcohol. In some embodiments, the inducible promoter may be one that has a low basal (non-induced) expression level, such as, e.g., the Tet-On® promoter (Clontech). In some embodiments, the promoter may be a tissue-specific promoter. In some embodiments, the tissue-specific promoter is exclusively or predominantly expressed in liver tissue. Non-limiting exemplary tissue-specific promoters include B29 promoter, CD14 promoter, CD43 promoter, CD45 promoter, CD68 promoter, desmin promoter, elastase-I promoter, endoglin promoter, fibronectin promoter, Flt-1 promoter, GFAP promoter, GPIIb promoter, ICAM-2 promoter, INF-β promoter, Mb promoter. Nphsl promoter, OG-2 promoter, SP-B promoter, SYN1 promoter, and WASP promoter.

[0698] In some embodiments, the prime editor and MLH1 dominant negative mutant vectors (e.g., including any vectors encoding the prime editor fusion protein and/or the PEgRNAs, and/or the accessory second strand nicking gRNAs) may comprise inducible promoters to start expression only after it is delivered to a target cell. Non-limiting exemplary inducible promoters include those inducible by heat shock, light, chemicals, peptides, metals, steroids, antibiotics, or alcohol. In some embodiments, the inducible promoter may be one that has a low basal (non-induced) expression level, such as, e.g., the Tet-On® promoter (Clontech).

[0699] In additional embodiments, the prime editor vectors (e.g., including any vectors encoding the prime editor fusion protein and/or the PEgRNAs, and/or the accessory second strand nicking gRNAs) and MLH1 dominant negative mutant vector (e.g., any vector encoding an MLH1 dominant negative mutant as described herein) may comprise tissue-specific promoters to start expression only after it is delivered into a specific tissue. Non-limiting exemplary tissue-specific promoters include B29 promoter, CD14 promoter, CD43 promoter, CD45 promoter, CD68 promoter, desmin promoter, elastase-1 promoter, endoglin promoter, fibronectin promoter, Flt-1 promoter, GFAP promoter, GPIIb promoter, ICAM-2 promoter, INF-s promoter, Mb promoter, Nphsl promoter, OG-2 promoter, SP-B promoter, SYN1 promoter, and WASP promoter.

[0700] In some embodiments, the nucleotide sequence encoding the PEgRNA (or any guide RNAs used in connection with prime editing) may be operably linked to at least one transcriptional or translational control sequence. In some embodiments, the nucleotide sequence encoding the guide RNA may be operably linked to at least one promoter. In some embodiments, the promoter may be recognized by RNA polymerase III (Pol III). Non-limiting examples of Pol III promoters include U6, H I and tRNA promoters. In some embodiments, the nucleotide sequence encoding the guide RNA may be operably linked to a mouse or human U6 promoter. In other embodiments, the nucleotide sequence encoding the guide RNA may be operably linked to a mouse or human HI promoter. In some embodiments, the nucleotide sequence encoding the guide RNA may be operably linked to a mouse or human tRNA promoter. In embodiments with more than one guide RNA, the promoters used to drive expression may be the same or different. In some embodiments, the nucleotide encoding the crRNA of the guide RNA and the nucleotide encoding the tracr RNA of the guide RNA may be provided on the same vector. In some embodiments, the nucleotide encoding the crRNA and the nucleotide encoding the tracr RNA may be driven by the same promoter. In some embodiments, the crRNA and tracr RNA may be transcribed into a single transcript. For example, the crRNA and tracr RNA may be processed from the single transcript to form a double-molecule guide RNA. Alternatively, the crRNA and tracr RNA may be transcribed into a single-molecule guide RNA.

[0701] In some embodiments, the nucleotide sequence encoding the guide RNA may be located on the same vector comprising the nucleotide sequence encoding the PE fusion protein. In some embodiments, expression of the guide RNA and of the PE fusion protein may be driven by their corresponding promoters. In some embodiments, expression of the guide RNA may be driven by the same promoter that drives expression of the PE fusion protein. In some embodiments, the guide RNA and the PE fusion protein transcript may be contained within a single transcript. For example, the guide RNA may be within an untranslated region (UTR) of the Cas9 protein transcript. In some embodiments, the guide RNA may be within the 5′ UTR of the PE fusion protein transcript. In other embodiments, the guide RNA may be within the 3′ UTR of the PE fusion protein transcript. In some embodiments, the intracellular half-life of the PE fusion protein transcript may be reduced by containing the guide RNA within its 3′ UTR and thereby shortening the length of its 3′ UTR. In additional embodiments, the guide RNA may be within an intron of the PE fusion protein transcript. In some embodiments, suitable splice sites may be added at the intron within which the guide RNA is located such that the guide RNA is properly spliced out of the transcript. In some embodiments, expression of the Cas9 protein and the guide RNA in close proximity on the same vector may facilitate more efficient formation of the CRISPR complex.

[0702] The vector system may comprise one vector, or two vectors, or three vectors, or four vectors, or five vector, or more. In some embodiments, the vector system may comprise one single vector, which encodes both the PE fusion protein, the PEgRNA, and an MLH1 dominant negative mutant. In other embodiments, the vector system may comprise two vectors, wherein one vector encodes the PE fusion protein and the PEgRNA, and the other encodes the MLH1 dominant negative mutant.

[0703] Some examples of materials which can serve as pharmaceutically-acceptable carriers include: (1) sugars, such as lactose, glucose and sucrose; (2) starches, such as corn starch and potato starch; (3) cellulose, and its derivatives, such as sodium carboxymethyl cellulose, methylcellulose, ethyl cellulose, microcrystalline cellulose and cellulose acetate; (4) powdered tragacanth; (5) malt; (6) gelatin; (7) lubricating agents, such as magnesium stearate, sodium lauryl sulfate and talc; (8) excipients, such as cocoa butter and suppository waxes; (9) oils, such as peanut oil, cottonseed oil, safflower oil, sesame oil, olive oil, corn oil and soybean oil; (10) glycols, such as propylene glycol; (11) polyols, such as glycerin, sorbitol, mannitol and polyethylene glycol (PEG); (12) esters, such as ethyl oleate and ethyl laurate; (13) agar; (14) buffering agents, such as magnesium hydroxide and aluminum hydroxide; (15) alginic acid; (16) pyrogen-free water; (17) isotonic saline; (18) Ringer's solution; (19) ethyl alcohol; (20) pH buffered solutions; (21) polyesters, polycarbonates and/or polyanhydrides; (22) bulking agents, such as polypeptides and amino acids (23) serum component, such as serum albumin, HDL and LDL; (22) C2-C12 alcohols, such as ethanol; and (23) other non-toxic compatible substances employed in pharmaceutical formulations. Wetting agents, coloring agents, release agents, coating agents, sweetening agents, flavoring agents, perfuming agents, preservative and antioxidants can also be present in the formulation. The terms such as “excipient”, “carrier”, “pharmaceutically acceptable carrier” or the like are used interchangeably herein. Delivery methods

[0704] In some aspects, the invention provides methods comprising delivering one or more polynucleotides, such as or one or more vectors as described herein, one or more transcripts thereof, and/or one or proteins transcribed therefrom, to a host cell. In some aspects, the invention further provides cells produced by such methods, and organisms (such as animals, plants, or fungi) comprising or produced from such cells. In some embodiments, a prime editor as described herein in combination with (and optionally complexed with) a guide sequence, as well as an inhibitor of the DNA mismatch repair pathway, are delivered to a cell. In any of the delivery methods described herein, an inhibitor of the DNA mismatch repair pathway can also be delivered along with the prime editor. In some embodiments, the inhibitor is MLH1dn as described further herein. In some embodiments, the inhibitor is encoded on the same vector as the prime editor. In certain embodiments, the inhibitor is fused to the prime editor. In some embodiments, the inhibitor is encoded on a second vector, which is delivered along with a vector encoding the prime editor. In some embodiments, the prime editor fusion protein and the inhibitor of the DNA mismatch repair pathway are delivered to a cell as proteins directly. In certain embodiments, the prime editor is fused to the inhibitor of the DNA mismatch repair pathway, and the fusion protein is delivered directly into a cell.

[0705] Exemplary delivery strategies include vector-based strategies, PE ribonucleoprotein complex delivery, and delivery of PE by mRNA methods. In some embodiments, the method of delivery provided comprises nucleofection, microinjection, biolistics, virosomes, liposomes, immunoliposomes, polycation or lipid:nucleic acid conjugates, naked DNA, artificial virions, and agent-enhanced uptake of DNA.

[0706] Exemplary methods of delivery of nucleic acids include lipofection, nucleofection, electoporation, stable genome integration (e.g., piggybac), microinjection, biolistics, virosomes, liposomes, immunoliposomes, polycation or lipid:nucleic acid conjugates, naked DNA, artificial virions, and agent-enhanced uptake of DNA. Lipofection is described in e.g., U.S. Pat. Nos. 5,049,386, 4,946,787; and 4,897,355) and lipofection reagents are sold commercially (e.g., Transfectam™, Lipofectin™ and SF Cell Line 4D-Nucleofector X Kit™ (Lonza)). Cationic and neutral lipids that are suitable for efficient receptor-recognition lipofection of polynucleotides include those of Feigner, WO 91/17424; WO 91/16024. Delivery may be to cells (e.g., in vitro or ex vivo administration) or target tissues (e.g., in vivo administration). Delivery may be achieved through the use of RNP complexes.

[0707] The preparation of lipid:nucleic acid complexes, including targeted liposomes such as immunolipid complexes, is well known to one of skill in the art (see, e.g., Crystal, Science 270:404-410 (1995); Blaese et al., Cancer Gene Ther. 2:291-297 (1995); Behr et al., Bioconjugate Chem. 5:382-389 (1994); Remy et al., Bioconjugate Chem. 5:647-654 (1994); Gao et al., Gene Therapy 2:710-722 (1995); Ahmad et al., Cancer Res. 52:4817-4820 (1992); U.S. Pat. Nos. 4,186,183, 4,217,344, 4,235,871, 4,261,975, 4,485,054, 4,501,728, 4,774,085, 4,837,028, and 4,946,787).

[0708] In other embodiments, the method of delivery and vector provided herein is an RNP complex. RNP delivery of fusion proteins markedly increases the DNA specificity of base editing. RNP delivery of fusion proteins leads to decoupling of on- and off-target DNA editing. RNP delivery ablates off-target editing at non-repetitive sites while maintaining on-target editing comparable to plasmid delivery, and greatly reduces off-target DNA editing even at the highly repetitive VEGFA site 2. See Rees, H. A. et al., Improving the DNA specificity and applicability of base editing through protein engineering and protein delivery, Nat. Commun. 8, 15790 (2017), U.S. Pat. No. 9,526,784, issued Dec. 27, 2016, and U.S. Pat. No. 9,737,604, issued Aug. 22, 2017, each of which is incorporated by reference herein.

[0709] Additional methods for the delivery of nucleic acids to cells are known to those skilled in the art. See, for example, US 2003/0087817, incorporated herein by reference.

[0710] Other aspects of the present disclosure provide methods of delivering the prime editor constructs into a cell to form a complete and functional prime editor within a cell. For example, in some embodiments, a cell is contacted with a composition described herein (e.g., compositions comprising nucleotide sequences encoding the split Cas9 or the split prime editor or AAV particles containing nucleic acid vectors comprising such nucleotide sequences). In some embodiments, the contacting results in the delivery of such nucleotide sequences into a cell, wherein the N-terminal portion of the Cas9 protein or the prime editor and the C-terminal portion of the Cas9 protein or the prime editor are expressed in the cell and are joined to form a complete Cas9 protein or a complete prime editor.

[0711] It should be appreciated that any rAAV particle, nucleic acid molecule or composition provided herein may be introduced into the cell in any suitable way, either stably or transiently. In some embodiments, the disclosed proteins may be transfected into the cell. In some embodiments, the cell may be transduced or transfected with a nucleic acid molecule. For example, a cell may be transduced (e.g., with a virus encoding a split protein), or transfected (e.g., with a plasmid encoding a split protein) with a nucleic acid molecule that encodes a split protein, or an rAAV particle containing a viral genome encoding one or more nucleic acid molecules. Such transduction may be a stable or transient transduction. In some embodiments, cells expressing a split protein or containing a split protein may be transduced or transfected with one or more guide RNA sequences, for example in delivery of a split Cas9 (e.g., nCas9) protein. In some embodiments, a plasmid expressing a split protein may be introduced into cells through electroporation, transient (e.g., lipofection) and stable genome integration (e.g., piggybac) and viral transduction or other methods known to those of skill in the art.

### EXAMPLES

### Example 1: Enhanced Prime Editing Systems Through Identification and Manipulation of Cellular Determinants of Editing Outcomes

### Introduction

[0712] The ability to manipulate the genome in a programmable manner has illuminated biology and shown promise in the clinical treatment of genetic diseases. Towards the goal of expanding the breadth of sequence changes that can be precisely installed in living cells, prime editing was developed, a gene editing approach that enables all types of targeted DNA base pair substitutions, small insertions, small deletions, and combinations thereof without requiring double-strand DNA breaks or donor DNA templates (Anzalone et al., 2020; Anzalone et al., 2019). Prime editing has been broadly applied to introduce genetic changes in flies (Bosch et al., 2021), rice and wheat (Lin et al., 2020), zebrafish (Petri et al., 2021), mouse embryos (Liu et al., 2020), post-natal mice (Liu et al., 2021), human stem cells (Sirin et al., 2020), and patient-derived organoids (Schene et al., 2020). Despite its versatility, prime editing efficiency can vary widely across different edit classes, target loci, and cell types (Anzalone et al., 2019). To maximize the utility of prime editing, cellular determinants of prime editing outcomes were identified, and the resulting insights were used to develop prime editing systems with improved efficiency and outcome purity.

[0713] The PE2 prime editing system comprises two components: an engineered reverse transcriptase (RT) fused to a Cas9 nickase (the PE2 protein) and a prime editing guide RNA (pegRNA) that contains both a spacer sequence complementary to target DNA and a 3′ extension encoding the desired edit (Anzalone et al., 2020; Anzalone et al., 2019) (FIG. 40A). Together, these components form a PE2-pegRNA complex that binds one strand of a target DNA locus and nicks the opposite strand. This nick exposes a DNA 3′ end that can hybridize to the primer binding site (PBS) in the pegRNA extension. Reverse transcription of the RT template within the pegRNA extension then generates a 3′ DNA flap that contains the edited sequence and ultimately leads to installation of that sequence into the genome.

[0714] The PE3 system differs from PE2 by using an additional single guide RNA (sgRNA) to nick the non-edited strand away from the pegRNA target, which enhances editing efficiency by stimulating replacement of the non-edited strand (Anzalone et al., 2019) (FIG. 40A).

[0715] According to the current model, the newly synthesized 3′ flap displaces an adjacent strand of genomic DNA through flap interconversion (FIG. 40A). Excision of the displaced 5′ flap then allows ligation of the edited sequence into the genome. Nicking the non-edited strand in the PE3 system is thought to induce cellular replacement of the non-edited strand during heteroduplex resolution, and thus promotes copying of the edited sequence to the complementary strand.

[0716] The inventors studied the roles of DNA repair mechanisms in prime editing and the development of improved prime editing systems through manipulation of those processes. As presented herein, pooled CRISPR interference (CRISPRi)-based screens were used to systematically probe the effect of 476 genes involved in DNA repair and associated processes on substitution prime editing outcomes. Specific DNA mismatch repair (MMR) genes were identified that strongly suppress prime editing efficiency and promote indel formation. Consistent with a model in which MMR reverts heteroduplex DNA formed during prime editing, classes of prime edits were identified that are less vulnerable to MMR activity and are therefore generated more efficiently, including G⋅C-to-C⋅G transversions and substitutions of three or more contiguous bases. Integrating these findings, novel prime editing systems were developed with improved editing outcomes through transient expression of a dominant negative MMR protein (MLH1dn). In MMR-proficient cell types, including induced pluripotent stem cells and primary T cells, these PE4 (PE2+MLH1dn) and PE5 (PE3+MLH1dn) systems enhance editing efficiency over PE2 and PE3 by an average of 7.7-fold and 2.0-fold, respectively, and increase edit:indel ratios (outcome purity) by 3.4-fold. Transient co-expression of MLH1dn did not result in detected changes to microsatellite repeat length, a clinically used biomarker of MMR proficiency (Umar et al., 2004). By varying codon usage, nuclear localization signal, Cas9 domain mutations, and linker composition and length, an optimized prime editor architecture (PEmax—see FIG. 54B) was engineered that further increases editing efficiency in synergy with improvements from PE4, PE5, and recently developed engineered pegRNAs (epegRNAs) (Nelson et al., 2021). Finally, it was shown that strategic installation of additional silent mutations nearby an intended edit can improve prime editing efficiency by weakening MMR recognition. These findings deepen the understanding of prime editing and establish prime editing systems with substantially improved efficiency and outcome purity across 169 different edits at 19 loci in seven mammalian cell types.

### Results

### Design of a Pooled CRISPRi Screen for Prime Editing Outcomes

[0717] A new genetic screening approach called Repair-seq was used to study prime editing efficiency and outcome, including the original sequence, the desired edit, and indel frequency. Repair-seq measures the effects of many loss-of-function perturbations on the outcomes of genome editing experiments by linking the identity of CRISPRi sgRNAs to edited sites in pooled screens (Hussmann et al., 2021) (FIG. 40B). Briefly, a library of sgRNAs are lentivirally transduced into cells expressing the CRISPRi effector protein (dCas9-KRAB) such that most infected cells receive only one sgRNA, causing the knockdown of one gene per cell. A target sequence for genome editing is also delivered with the library sgRNAs in the same lentiviral cassette. After genome editing occurs at this target site, paired-end sequencing then enables the frequency of each editing outcome to be measured alongside each linked CRISPRi perturbation.

[0718] To adapt Repair-seq for prime editing, prime editing and CRISPRi, which typically also relies on Streptococcus pyogenes Cas9 (SpCas9), were first made orthogonal. An SaPE2 prime editor variant was constructed by replacing the SpCas9 nickase domain in PE2 with Staphylococcus aureus Cas9 (SaCas9) N580A nickase (Ran et al., 2015). Prime editing activity was verified using SaPE2 and orthogonal S. aureus pegRNAs (Sa-pegRNAs) (FIG. 47A).

[0719] Next, a lentiviral Repair-seq vector was designed for screening with SaPE2 by adding a composite SaPE2 edit site. This site was comprised of a single target protospacer that was identified to be efficiently edited in HEK293T cells (FIG. 47A) and two flanking protospacers that allowed complementary-strand (the non-edited strand) nicks 50-bp downstream (+50 nick) or upstream (−50 nick) of the target (FIG. 40B. FIG. 47B). This design supported prime editing with SaPE2 in three approaches: PE2, PE3 with a +50 nick (PE3+50), or PE3 with a −50 nick (PE3-50) (FIG. 47C).

[0720] To enable screening, Sa-pegRNAs were optimized for editing this site in a validated HeLa CRISPRi cell line (Gilbert et al., 2013). Transfection of these cells with SaPE2, Sa-pegRNA, and Sa-sgRNA plasmids that program a G⋅C-to-C⋅G transversion at the edit site yielded up to 5.2% editing and 0.17% indels (PE2), 12% editing and 5.8% indels (PE3+50), and 2.6% editing and 19% indels (PE3-50) (FIG. 47D). The high proportion of indels from PE3-50 is consistent with past reports that 3′ overhangs left by dual nicks lead to a higher frequency of insertions, as compared to 5′ overhangs (Bothmer et al., 2017). Intended editing frequencies were increased to 9.4% with PE2, 15% with PE3+50, and 3.5% with PE3-50 using a SaPE2 construct carrying a blasticidin selection marker to enrich successfully transfected cells (FIG. 47E). Together, these efforts established a screening assay with a baseline of prime editing outcomes in an efficiency range well-suited to detect increases or decreases in editing from CRISPRi perturbations.

Identification of DNA Repair Components that Affect Prime Editing Outcomes

[0721] With this optimized assay, Repair-seq screens of prime editing outcomes were performed with PE2 and PE3+50 in K562 and HeLa cells and with PE3-50 in HeLa cells. A library of 1,513 sgRNAs targeting 476 genes enriched for roles in DNA repair and associated processes (FIG. 48F), along with 60 non-targeting control sgRNAs, were cloned into the lentiviral screening vector (Hussmann et al., 2021) (Table 5). This library was transduced into human K562 and HeLa CRISPRi cell lines (Gilbert et al., 2014: Gilbert et al., 2013) and, after 5 days, cells were transfected with SaPE2, Sa-pegRNA, and Sa-sgRNA plasmids that program a G⋅C-to-C⋅G transversion at the pre-validated edit site. Genomic DNA was extracted from cells 3 days after transfection, a 453-bp region containing the CRISPRi sgRNA, edit site, and complementary nick sites was amplified by PCR, and paired-end sequencing was performed to measure the distribution of editing outcomes for each genetic perturbation (FIG. 40B, FIG. 47B). To interpret the resulting data, the frequencies of editing outcomes from cells containing a gene-targeting CRISPRi sgRNA were compared to the corresponding frequencies from cells containing non-targeting sgRNA controls. Reduction in an outcome's frequency upon gene knockdown suggests that the gene's activity promotes formation of the outcome, while an increase in frequency suggests that the gene's activity suppresses the outcome.

[0722] The effect of gene knockdowns on the frequency of the intended G⋅C-to-C⋅G edit was examined. In cells with non-targeting CRISPRi sgRNAs, 4.3-4.9% (K562) and 8.5-8.7% (HeLa) of sequencing reads contained exactly the intended edit following PE2 editing (FIGS. 40C-40D). These levels increased to 14-16% (K562) and 14-16% (HeLa) for PE3+50, but decreased to 2.1-2.2% (HeLa) for PE3-50. Across all prime editing conditions screened, CRISPRi targeting of MSH2, MSH6, MLH1, and PMS2, components of the MutSα-MutLα MMR complex (Iyer et al., 2006; Kunkel and Erie, 2005; Li, 2008), substantially increased editing efficiency by up to 5.8-fold for PE2, 2.5-fold for PE3+50, and 2.0-fold for PE3-50 (FIGS. 40E-40G and 47G-47J, Table 6). Knockdown of EXO1, an exonuclease with a role in MMR (Genschel et al., 2002), also increased intended editing efficiency by up to 2.3-fold for PE2 in K562 cells. In contrast, knockdown of LIG1, a nick-sealing DNA ligase (Pascal et al., 2004), and of FEN1, a 5′ flap endonuclease (Liu et al., 2004), reduced the frequency of intended editing, consistent with their previously proposed roles in nick ligation and 5′ flap excision during prime editing (Anzalone et al., 2019). Together, these data suggest that MMR activity antagonizes the installation of point mutations by prime editing.

[0723] In addition to the intended edit, Repair-seq screens also measure the effects of genetic perturbations on the formation of editing byproducts. These byproducts were classified into four primary categories: deletions (FIG. 41A), tandem duplications (FIG. 41B), and two classes of outcomes containing unintended sequence from the pegRNA (FIGS. 41C-41D). Low baseline frequencies of total unintended edits from PE2 (0.31% in K562, 0.60% in HeLa; FIG. 41E), but more frequent and diverse unintended byproducts from PE3-50 (58% in HeLa; FIG. 48A) and PE3+50 (8.2% in K562, 9.5% in HeLa; FIG. 41F) were observed. The baseline frequencies and genetic modulators of these categories varied across PE2, PE3+50, and PE3-50 screens, providing a rich set of observations of how different prime editing configurations are processed (FIGS. 48A-48I). Two of these observations informed models for the role of MMR activity during prime editing.

[0724] First, one unintended outcome category contained the intended G⋅C to C⋅G edit as well as an additional base substitution and a 1-nucleotide (nt) insertion near the target site (FIG. 41C). The sequence at these additional mutations perfectly matched 9-nt at the 3′ end of the pegRNA scaffold sequence, consistent with reverse transcription into the pegRNA scaffold and incorporation of the resulting 3′ DNA flap into partially homologous genomic sequence. Recoding the pegRNA scaffold to avoid sequence homology with the genomic target strongly reduced the frequency of these additional mutations (FIGS. 49A-49B), suggesting a generalizable approach to eliminate this type of editing byproduct. Notably, it was observed that knockdown of MMR genes increased the frequency of this editing byproduct from 0.08% to 2.0% in PE2 K562 screens (FIG. 41E, FIG. 48D). MMR thus suppresses the formation of this outcome to a larger extent than the intended edit, demonstrating that distinct prime editing intermediates can differ in the extent to which they are processed by MMR.

[0725] Second, MMR knockdown reduced the frequency of most categories of unintended outcomes from PE3+50 (FIGS. 41F-41H and 48H), suggesting that transiently inhibiting some MMR activities may increase both the efficiency and outcome purity of prime editing. While tandem duplications of sequence between the nicks were common for PE3-50 (FIG. 48A), these duplication outcomes were rarer for PE3+50 (0.37% of non-targeting reads in K562, 2.3% in HeLa) and were reduced by up to 3.7-fold (K562) and 1.5-fold (HeLa) by MMR knockdown (FIG. 41F. FIG. 48H). The most abundant class of unintended PE3+50 outcomes contained sequence from the reverse-transcribed 3′ DNA flap that does not rejoin genomic sequence at the intended flap annealing location (5.1% of non-targeting reads in K562, 3.8% in HeLa; FIG. 41D). In both cell types, the frequency of unintended flap rejoining outcomes increased upon knockdown of HLTF, a fork remodeling helicase (Poole and Cortez, 2017), but was reduced by up to 1.7-fold by knockdown of MMR genes (FIG. 41H). Finally, MMR knockdown substantially reduced deletions from PE3+50 by up to 3.7-fold (K562) and 1.6-fold (HeLa; FIG. 41G). MMR knockdown in K562 cells also qualitatively shifted the observed boundaries of deleted sequence. For both PE3 configurations, genomic sequence between the two SaPE2-induced nicks was most frequently deleted, but deletions extending outside of this region were also observed (FIG. 41I, top). MMR knockdown decreased the frequency of these longer deletions dramatically more than deletions between the programmed nicks with PE3+50 (FIG. 41I, bottom and FIG. 41J), suggesting that MMR activity may cause the formation of longer deletions during prime editing. Model for mismatch repair of prime editing intermediates

[0726] The effects of MMR knockdown on both intended and unintended editing outcomes in these Repair-seq screens led to a working model for the role of MMR during prime editing. In eukaryotes, MMR resolves DNA heteroduplexes containing a single base mismatch or small insertion-deletion loop (IDL) by selectively replacing the DNA strand that contains a nearby nick (Iyer et al., 2006; Kunkel and Erie, 2005; Li, 2008). To initiate MMR, the heteroduplex is first bound by MutSα (MSH2-MSH6), which recognizes base mismatches and 1- to 2-nt IDLs (Warren et al., 2007), or by MutSβ (MSH2-MSH3), which recognizes 2- to 13-nt IDLs (Gupta et al., 2012) (FIG. 42C). Next, MSH2 recruits the MutLα heterodimer (PMS2-MLH1), which incises only the nick-containing strand around the heteroduplex (Fang and Modrich, 1993; Kadyrov et al., 2006; Pluciennik et al., 2010: Thomas et al., 1991). From these incisions, EXO1 mediates 5′-to-3′ excision of the heteroduplex (Genschel et al., 2002), polymerase δ resynthesizes the excised DNA strand, and ligase I (LIG1) seals the nascent strand to complete repair (Iyer et al., 2006; Kunkel and Erie, 2005; Zhang et al., 2005).

[0727] Without wishing to be bound by theory, MMR may engage a specific prime editing intermediate: a DNA heteroduplex formed by hybridization of the reverse-transcribed 3′ DNA flap to the adjacent genomic DNA (FIG. 42A). If MutSα-MutLα recognizes the heteroduplex within this structure, the 3′ nick present after flap equilibration—but before ligation—could stimulate selective excision of the edited strand and subsequent repair to regenerate the original, unedited sequence. Alternatively, MMR may also prevent productive flap interconversion by rejecting annealing of the edited 3′ flap to the genomic target (Sugawara et al., 2004). In either case, inhibiting MMR during prime editing could delay heteroduplex repair or increase the likelihood of nick ligation. Moreover, successful nick ligation would remove the ability of MMR to bias resolution of the heteroduplex towards removal of the edited product. This model is supported by substantial increases in PE2 editing efficiencies (1.6- to 5.8-fold) from knockdown of MutSα-MutLα genes (FIG. 40C-40D), which strongly suggest that the 3′-nicked heteroduplex intermediate is often repaired by MMR to the original sequence before ligation of the nick (FIG. 42A). Interfering with MMR reversion of these intermediates can thus enhance prime editing efficiency.

[0728] This model also explains the benefit from complementary-strand nicks in the PE3 editing system. Nicking the non-edited strand of the heteroduplex intermediate introduces an additional strand discrimination signal that could direct MMR to more frequently replace the non-edited strand, leading to higher prime editing efficiency and dampened effects of MMR suppression (FIG. 42B). Consistent with this model, knockdown of MutSα-MutLα components increased intended G⋅C-to-C⋅G editing by up to 5.8-fold for PE2, but only by up to 2.6-fold for PE3+50 (FIG. 40G). MMR activity may also promote successful prime editing by directing excision of the non-edited strand, but only for a prime editing intermediate in which the edited strand has been ligated and the non-edited strand is nicked. However, MMR knockdown substantially enhances PE3+50 editing in K562 and HeLa cells (FIG. 40F), suggesting that this intermediate is uncommon and that MMR typically repairs the heteroduplex before nick ligation.

[0729] The mechanism of MMR may also explain how MutSα-MutLα gene knockdown reduces indel byproducts from PE3+50 (FIG. 41F). During repair of prime editing heteroduplex intermediates, MutLα may induce DSBs by indiscriminately nicking the target locus, particularly when both DNA strands already contain pegRNA- and sgRNA-programmed nicks (FIG. 49D). DSBs formed after excision from these additional, non-programmed nicks could broaden the boundaries of indels at prime edited loci. In agreement with this hypothesis, knockdown of MutSα-MutLα components disproportionately reduced PE3+50 deletion outcomes outside of the sequence between pegRNA and sgRNA nicks (FIG. 41I). Taken together, these findings from Repair-seq screens thus support a model in which MMR activity strongly suppresses intended prime editing outcomes and instead promotes indel byproducts.

### MMR Inhibition Improves Prime Editing at Endogenous Loci

[0730] The effect of MMR on prime editing was tested with canonical SpCas9-based prime editors at endogenous genomic loci and in additional cell types. HEK293T cells were treated with siRNAs targeting MSH2, MSH6, MLH1, or PMS2, the cells were cultured for 3 days to allow siRNA-mediated knockdown (FIG. 49E), then plasmids encoding PE2 and pegRNAs that program point mutations at three endogenous genomic loci were transfected (EMX1, RUNX1, and HEK293T cell site 3, hereafter referred to as HEK3). Across these loci, it was observed that mRNA knockdown strongly increased average PE2 editing from 7.7% to 25% with a decrease in indel frequency from 0.39% to 0.28% (FIG. 42C), but improved average PE3 editing efficiency to a lesser extent (from 25% to 37%). These results are consistent with the model presented herein, which states that complementary-strand nicking improves prime editing efficiency by directing MMR of the unedited strand. Thus, the impact of MMR on PE3 editing efficiency is tempered by its opposing effects on reverting the 3′ flap intermediate (which impedes prime editing) and on mediating replacement of the unedited strand (which promotes prime editing). Additionally, knockdown of MMR genes reduced the frequency of PE3 indels from 5.5% down to 3.2% on average, resulting in a 2.9-fold increase in PE3 outcome purity (FIG. 42C). These findings demonstrate that inhibition of MMR components can improve prime editing outcomes at endogenous genomic sites in human cells.

[0731] Prime editing was measured in MMR-deficient ΔMSH2 or ΔMLH1 haploid HAP1 cells. PE2 prime editing efficiency was much greater in MMR-deficient HAP1 cells (17% at HEK3, 5.0% at EMX1) than in wild-type control cells (0.44% at HEK3, 0.07% at EMX1; FIG. 42D). Moreover, consistent with the hypothesis stated herein, nicking the unedited strand at these loci did not affect editing efficiency in MMR-deficient HAP1 cells (FIG. 42D). Taken together, these results further support a model in which MMR impedes prime editing by promoting excision of the edited DNA strand, even though this effect is partially counterbalanced in the PE3 system by the role of MMR in replacing the non-edited strand.

### Engineered Dominant Negative MMR Proteins Enhance Prime Editing Efficiency and Precision

[0732] Encouraged that cellular pre-treatment with MMR-targeting siRNAs can enhance prime editing efficiency, strategies for simultaneous co-delivery of prime editors and MMR-inhibiting agents were explored. Co-transfection of PE2 and MLH1 siRNAs without pre-treatment did not substantially increase editing efficiency after 3 days (FIG. 49F). It was hypothesized that dominant negative MMR protein variants could instead be transiently co-expressed with PE2 or as fusion proteins with PE2 to enhance prime editing. HEK293T cells were co-transfected with plasmids encoding PE2, pegRNAs, and ATPase-deficient mutants of human MSH2, MSH6, PMS2, and MLH1 (laccarino et al., 1998; Räschle et al., 2002; Tomer et al., 2002), or endonuclease-deficient mutants of PMS2 and MLH1 (Gueneau et al., 2013; Kadyrov et al., 2006) (FIG. 43A). Of these mutants, ATPase-impaired MLH1 E34A and endonuclease-impaired MLH1 Δ756 increased PE2 editing efficiency by 1.6- to 3.1-fold for three single-base substitution edits at the HEK3, EMX1, and RUNX1 loci.

[0733] Next, additional dominant negative MLH1 variants were engineered and tested to maximize the enhancement of prime editing efficiency. The MLH1 N-terminal domain (NTD) mediates MutLα (PMS2-MLH1) recruitment to MSH2 during MMR (Plotz et al., 2003) and contains an ATPase essential for MutLα function (Kadyrov et al., 2006) (FIG. 43B). In contrast, the MLH1 C-terminal domain (CTD) dimerizes with PMS2 and contributes to MutLα endonuclease activity critical for MMR (Gueneau et al., 2013) (FIG. 43B). While the MLH1 Δ756 dominant negative variant disrupts this endonuclease, it was found that a larger deletion of these residues (MLH1 Δ754-756) further elevated prime editing efficiency at three sites tested (FIG. 43C, FIG. 50A). Combining ATPase and endonuclease mutations (ML H1 E34A Δ754-756) did not further improve prime editing, however (FIG. 43C). Comparing these dominant negative MLH1 variants across ten prime edits, it was observed that MLH1 Δ754-756 enhanced PE2 editing efficiencies to the greatest extent on average (by 3.2-fold: FIG. 50D). Thus, MLH1 Δ754-756 was designated as MLH1dn. MLH1dn improved prime editing in a dose-dependent manner within HEK293T cells (FIG. 50B). MLH1dn did not increase editing in MMR-deficient HCT116 cells (Parsons et al., 1993) (FIG. 50C). Both human and mouse MLH1dn also improved substitution prime editing efficiency across three sites in human HEK293T cells and four sites in mouse N2A cells (FIGS. 50D-50E).

[0734] Next, shorter MLH1 truncations that can also inhibit MMR during prime editing were identified. On its own, the MLH1 NTD (residues 1-335) modestly enhanced PE2 editing by 1.5- to 1.8-fold, but introducing the E34A ATPase mutation weakened this improvement at two of three tested loci (FIG. 43C, FIG. 50A). Appending a nuclear localization signal (NLS) to the MLH1 NTD boosted PE2 editing by 1.9- to 2.5-fold, to a similar degree as full-length MLH1dn. In contrast, the MLH1 CTD (residues 501-756), as well as endonuclease mutants and NLS-appended variants thereof, did not substantially enhance PE2 editing (FIG. 43C, FIG. 50A). These data suggest that dominant negative MLH1 variants can inhibit MMR by forming catalytically impaired MutLα complexes with PMS2 or by saturating the binding of MSH2, which would prevent productive recruitment of MutLα during MMR. Full-length MLH1dn, which can do both, could inhibit MMR through both mechanisms, but NLS-appended MLH1 NTD (hereafter referred to as MLH1^{NTD}-NLS) would be expected to inhibit MMR through MSH2 binding as it lacks the CTD needed to dimerize with PMS2 (Guerrette et al., 1999). MLH1^{NTD}-NLS improves PE2 editing efficiency to almost the same extent as MLH1dn (FIG. 43C, FIG. 50A), suggesting that MSH2 sequestration is an effective mechanism for inhibiting MMR.

[0735] MLH1dn or MLH1^{NTD}-NLS were also directly fused to the PE2 protein (via a 32aa (SGGS)x2-XTEN16-(SGGS)x2 linker), but did not exhibit higher editing efficiency compared to PE2 alone (FIG. 50A). However, appending MLH1dn to PE2 with a self-cleaving P2A linker (PE2-P2A-MLH1dn) (Kim et al., 2011) enhanced prime editing efficiency at three sites by 2.0- to 2.7-fold (FIG. 50A). Among the 55 total dominant negative MMR protein variants tested across three loci in HEK293T cells, PE2 and MLH1dn expressed in trans provided the greatest average enhancement in PE2 editing efficiency (3.2-fold). Strong average improvement of PE2 editing was also observed from PE2 with MLH1^{NTD}-NLS expressed in trans (2.7-fold) and PE2-P2A-MLH1dn (2.4-fold) (FIG. 43C). These three variants also increased PE3 editing efficiency by 1.2-fold on average but reduced undesired indel products by 1.4- to 4.0-fold (FIG. 43E). PE2 editing with MLH1dn was designated as the PE4 system, and PE3 editing with MLH1dn as the PE5 system (FIG. 43F). MLH1^{NTD}-NLS can also offer enhanced prime editing efficiencies with a smaller protein (355-aa) compared to MLH1dn (753-aa). When a single construct is required, the use of PE2-P2A-MLH1dn is recommended.

[0736] The generality of PE4 and PE5 systems were assessed with seven additional single-base substitution edits across different genomic loci in HEK293T cells. On average, PE4 improved editing efficiency over PE2 by 2.0-fold with minimal indels (<0.4% on average; FIG. 43G). PE5 improved editing over PE3 by 1.2-fold and enhanced edit:indel purity by 3.0-fold (FIG. 43G). Whether MLH H1dn could elevate the efficiency of PE3b, a prime editing strategy that uses a complementary-strand nick specific for the edited sequence to minimize coincident nicks on both strands that promote indel formation (Anzalone et al., 2019), was also tested. PE3b with co-expression of MLH1dn (hereafter referred to as PE5b) increased editing at the FANCF locus by 1.7-fold over PE3b with low indel frequencies (<0.6%; FIG. 50H). Moreover, it was shown that PE4 offers substantially improved prime editing performance compared to PE2 when indels must be minimized or at loci where complementary-strand nicks yield unproductive editing outcomes (FIG. 50H). Prime editing enhancement from MLH1dn versus complete MLH1 knockout was also compared in clonal HeLa cell lines. At four sites tested, MLH1 knockout enhanced PE2 and PE3 editing to a larger degree than MLH1dn co-expression (PE4 and PE5; FIG. 50F), suggesting opportunities for additional prime editing enhancement through further modulation of this pathway. Collectively, these data establish PE4 and PE5 systems that substantially enhance prime editing efficiency and outcome purity at a variety of endogenous genomic loci in human cells.

### Characterization of the Types of Prime Edits Enhanced by PE4 and PE5

[0737] Next, the extent to which MLH1dn improves prime editing across a wide range of different edit types was studied. PE4 was compared with PE2 in HEK293T cells using 84 pegRNAs that together introduce all 12 possible single-base substitutions across seven genomic loci. Among these edits, MLH1dn improved prime editing efficiency by 2.0-fold and reduced average indel frequencies from 0.40% to 0.31% compared to PE2 (FIG. 44A-B, FIGS. 51A-51B).

[0738] MLH1dn increased the efficiency of A⋅T-to-G⋅C, T⋅A-to-G⋅C, and C⋅G-to-A⋅T prime edits to a lesser extent, by 1.7-fold over PE2. Notably, G⋅C-to-C⋅G substitutions, which form C⋅C mismatches after 3′ flap hybridization, were the least improved with MLH1dn (1.2-fold), consistent with previous studies establishing that C⋅C mismatches are not efficiently repaired by MMR (Lahue et al., 1989; Su et al., 1988; Thomas et al., 1991). This finding suggests that G⋅C-to-C⋅G edits more effectively evade MMR and may therefore yield higher basal editing efficiency. Consistent with this possibility, G⋅C-to-C⋅G edits with PE2 were substantially more efficient (27%) than G⋅C-to-A⋅T (18%) or G⋅C-to-T⋅A (20%) edits among PAM-altering prime edits across seven endogenous loci (FIG. 51C).

[0739] To further confirm that G⋅C-to-C⋅G substitutions are less sensitive to MMR, the effect of MMR knockdown or knockout was tested on the efficiency of a G⋅C-to-C⋅G prime edit at the RNF2 locus that is unaffected by MLH1dn co-expression (FIG. 51A). siRNA knockdown of MMR components in HEK293T cells (FIG. 51D) and knockout of MSH2 or MLH1 in HAP1 cells (FIG. 51E) did not change the efficiency of this G⋅C-to-C⋅G edit. G⋅C-to-A⋅T, G⋅C-to-C⋅G, and G⋅C-to-T⋅A edits were also compared with SaPE2 at the pre-validated screening site in HeLa CRISPRi cells (FIG. 40B). PE2 and PE3+50 more efficiently installed the G⋅C-to-C⋅G edit than the G⋅C-to-A⋅T or G⋅C-to-T⋅A edits, consistent with weaker MMR activity at C⋅C mismatches (FIG. 51F). Furthermore, CRISPRi knockdown of MSH2 improved G⋅C-to-A⋅T and G⋅C-to-T⋅A editing efficiencies (by 16-fold for PE2 and 4.3-fold for PE3+50) to a greater extent than G⋅C-to-C⋅G editing (by 4.0-fold for PE2 and 1.9-fold for PE3+50). These data strongly support that G⋅C-to-C⋅G prime edits are less susceptible to repair by MMR and are consequently installed with higher efficiency.

[0740] PE5 and PE3 were also compared with the same set of 84 pegRNAs used in the above experiments. PE5 yielded an average 1.2-fold increase in editing relative to PE3 (FIG. 44A, FIG. 51A, FIG. 51G). MLH1dn substantially reduced the frequency of unwanted indel products by 2.2-fold on average, resulting in 2.8-fold higher edit:indel purity (FIG. 44A). Collectively, this analysis of 84 different single-nucleotide substitutions at seven genomic loci strongly support a model in which PE4 and PE5 systems improve prime editing efficiency and outcome purity by impairing counterproductive MMR of prime editing intermediates.

[0741] To determine if MLH1dn could also improve small insertion and deletion prime edits, 1- and 3-bp insertions and deletions were next installed with PE4 and PE5 in HEK293T cells. Across 12 pegRNAs at three loci, it was observed that PE4 increased average editing efficiency by 2.2-fold over PE2 with no increase in indel frequency, while PE5 increased editing efficiency by 1.2-fold and edit:indel purity by 2.9-fold over PE3 (FIGS. 44C and 51I). To evaluate the impact of MLH1dn on larger sequence changes, PE2 and PE4 were tested with a combined 33 pegRNAs that together program 1-, 3-, 6-, 10-, 15-, and 20-bp insertions and deletions at the HEK3 and FANCF loci. It was found that the enhancement in prime editing efficiency from MLH1dn gradually declined as the length of the insertions and deletions increased (FIGS. 44D and 51H), such that 15- and 20-bp insertions and deletions were edited by PE4 only 1.1-fold more efficiently on average than by PE2. These observations are consistent with previous reports that MMR repairs IDLs <13-nt in length (Acharya et al., 1996; Genschel et al., 1998; Umar et al., 1994). These results together demonstrate that PE4 and PE5 strategies can enhance small (<15-bp) targeted insertions and deletions.

### Installing Additional Silent Mutations can Increase Prime Editing Efficiency by Evading MMR

[0742] Whether other classes of prime edits could bypass MMR was also explored. In addition to point mutations, short insertions, and short deletions, prime editing can also install multiple neighboring or contiguous base substitutions (Anzalone et al., 2019). MutSα and MutSβ heterodimers each recognize specific heteroduplex DNA structures (Gupta et al., 2012; Warren et al., 2007), suggesting that a DNA bubble of contiguous mismatches could weaken recognition from these MMR components. To assess this possibility. PE2 and PE4 were tested with 35 different edits that generate 1-5 contiguous base substitutions at five genomic loci in HEK293T cells. Across seven edits that mutate two adjacent bases, PE4 yielded 2.3-fold higher editing efficiency than PE2, comparable to the 2.4-fold enhancement for single-base substitutions at the same target nucleotides (FIG. 44E, FIG. 52A). In contrast, the editing frequencies of longer 3- to 5-base contiguous substitutions were only improved by 1.2- to 1.5-fold with PE4 relative to PE2. The reduced impact of MMR on these larger edits was reflected in higher average PE2 editing efficiency of for 3- to 5-bp contiguous substitutions (13% across 21 edits) compared to 1-2 bp contiguous substitutions (4.8% across 14 edits) (FIG. 44F, FIG. 52A). Inhibiting MMR with MLH1dn (PE4) raised the average editing frequency of these 3-5-bp and 1-2-bp contiguous substitutions to 16% and 10%, respectively, lessening the difference between these edit types.

[0743] Installing additional silent mutations nearby the intended edits could similarly increase prime editing efficiency by weakening repair of the resulting heteroduplex (FIG. 51G), even in the absence of any MLH1 inhibition. PE2 was tested at six gene targets with either pegRNAs that program only a coding mutation or with pegRNAs that program additional silent mutations close to the coding edit (most fewer than 5 bp away). At four of six sites, making additional silent mutations increased the efficiency of the desired coding changes, by an average of 1.8-fold for the best pegRNAs at each site (FIGS. 44H and 52B). Inhibiting MMR with MLH1dn (PE4) improved editing efficiency with the best silent pegRNAs to a lesser extent (1.2-fold on average) than with pegRNAs that only make a coding mutation (1.7-fold), suggesting that these additional silent mutations enhance editing by evading MMR. Consistent with this mechanism, at the two sites in which silent pegRNAs do not improve editing, it was observed that the tested silent mutations do not substantially dampen the effect of MMR inhibition on editing efficiency (FIG. 52B). Collectively, these findings support that MMR less efficiently repairs heteroduplexes containing three or more contiguous mismatched bases and reveal, surprisingly, that the strategic installation of additional silent or benign mutations nearby the desired edit can increase prime editing efficiency by evading MMR reversal of prime editing intermediates, even when using PE2- or PE3-based systems that do not manipulate MMR activity.

PE4 and PE5 Strongly Improves Prime Editing in Cell Types with Fully Active MMR

[0744] HEK293T cells are partially MMR-deficient due to MLH1 promoter hypermethylation (Trojan et al., 2002), which in light of the above findings may explain higher prime editing efficiency observed in HEK293T cells compared to other mammalian cell types (Anzalone et al., 2019). To evaluate whether MLH1dn also improves prime editing to a greater degree in cells with fully active MMR, prime editing was compared in HEK293T cells and in MMR-proficient HeLa cells using 30 pegRNAs that together target seven loci. Consistent with higher MMR activity in HeLa cells (Holmes et al., 1990; Thomas et al., 1991), complementary-strand nicking (PE3 vs. PE2) resulted in much larger improvements in prime editing efficiency in HeLa cells (22-fold on average) than in HEK293T cells (3.5-fold; FIGS. 44I-44J and 52C.). Likewise, PE4 enhanced average editing efficiency over PE2 to a much greater extent in MMR-proficient HeLa cells (6.7-fold) than in partially MMR-deficient HEK293T cells (2.0-fold) across the same 30 edits, while maintaining minimal indel frequencies (0.67% on average in HeLa cells). Similarly, PE5 improved average editing efficiency over PE3 by 1.9-fold in HeLa cells but only by 1.1-fold in HEK293T cells. MLH1dn also increased edit:indel ratios on average by 2.8-fold in HeLa cells and 3.2-fold in HEK293T cells (FIG. 44I).

[0745] PE4 and PE5 were also assessed in MMR-proficient K562 and U2OS cell lines (Matheson and Hall, 2003; Peng et al., 2014). Across six sites in K562 cells and four sites in U2OS cells, PE4 and PE5 elevated average prime editing efficiency by 6.0-fold and 1.7-fold over PE2 and PE3, respectively (FIGS. 44I-44J), again offering a much larger benefit than was observed in MMR-impaired HEK293T cells. PE5 in these cells also improved edit:indel purity over PE3 by 2.6-fold. Intriguingly, although PE4 only increased G⋅C-to-C⋅G editing frequency at DNMT1 by 1.4-fold over PE2 in HEK293T cells (FIG. 51A), a larger improvement was observed in HeLa, K562, and U2OS cells (averaging 2.7-fold; FIG. 44J), suggesting that PE4 and PE5 can enhance prime editing in MMR-proficient cell types even for classes of edits that evade MMR activity more effectively. Together, this comparison between 70 edits across seven endogenous sites in HEK293T, HeLa, K562, and U2OS cells illustrate that MLH1 dn substantially improves prime editing efficiency, but especially in cell types that are not MMR-deficient.

### Effect of MLH1dn on Prime Editing Outcome Purity

[0746] How MLH1dn reduces unintended prime editing outcomes at endogenous genomic targets was characterized next in depth. To decouple steps that lead to prime editing from those that lead to indel byproducts, prime editors were tested with non-editing pegRNAs that template a 3′ DNA flap with perfect complementarity to the target locus and would result in no sequence change at the target locus (FIG. 45A). Across four sites in HEK293T cells, these non-editing pegRNAs yielded an average 4.4% indels with PE3 and 4.3% indels with PE5 (FIGS. 45B-45C, FIG. 53A). In contrast, four pegRNAs that program single-nucleotide mutations at these sites generated on average 8.5% indels with PE3 and 4.8% indels with PE5. These data show that MMR inhibition with MLH1 dn does not alter indel frequencies in the absence of a heteroduplex. It was also observed that MLH1dn did not alter the frequency of indels from pegRNAs and nicking sgRNAs co-transfected with PE2-dRT, a PE2 containing an inactivated reverse transcriptase, or with SpCas9 H840A nickase (nCas9; FIG. 53A), suggesting that MMR does not affect the repair of a doubly nicked intermediate that lacks a reverse-transcribed 3′ flap. These results together strongly suggest that MMR engagement of the prime editing heteroduplex intermediate stimulates indel products that can be mitigated with PE5.

[0747] Next, evidence that MMR activity expands the size of prime editing indel byproducts was looked for at seven endogenous loci in HEK293T cells. The distribution of unintended target sequence deletions from PE3 and PE5 was compared with 84 pegRNAs encoding single-base substitutions. Consistent with findings from the Repair-seq screens (FIG. 41I), MLH1dn in the PE5 system reduced deletions outside of the pegRNA- and sgRNA-programmed nicks to a greater extent than deletions between these nicks (FIGS. 45D-45E, 53B). In comparison. MLH1dn did not affect the distribution of prime editing deletion outcomes from a non-editing pegRNA that does not create a mismatch (FIG. 53C). Taken together, this analysis supports a model in which non-programmed incisions by MutLα and subsequent excision at the target locus generates larger indel byproducts during MMR of prime editing intermediates.

[0748] Lastly, it was examined how MLH1dn impacts pegRNA scaffold sequence incorporation and unintended flap rejoining, two unintended outcome categories previously identified in the Repair-seq screens (FIGS. 41C-41D). Across the 84 pegRNAs tested in HEK293T cells above, PE5 reduced the average frequency of these combined outcomes by 1.6-fold compared to PE3 (from 1.8% to 1.0% on average, FIG. 45F, FIG. 53D). Consistent with data from PE2 and PE3+50 screens (FIGS. 41E-41F), these outcomes were much rarer in the absence of a complementary-strand nick (0.27% frequency for PE2, 0.28% for PE4; FIG. 53D), suggesting that they typically form through a doubly nicked intermediate. Thus, PE5 broadly narrows the size of unintended deletions and reduces the frequency of pegRNA scaffold sequence incorporation and unintended flap rejoining compared to PE3.

### Effect of MLH1dn on Off-Target Genomic DNA Changes

[0749] It was next assessed whether MMR component manipulation could influence off-target editing. PE2 and PE4 were tested in HEK293T cells with eight pegRNAs targeting the HEK3, EMX1, FANCF, and HEK4 loci. The resulting genomic changes were measured at the top four Cas9 off-target sites identified by CIRCLE-seq for each of the targeted loci (Tsai et al., 2017). The average frequency of off-target prime editing remained very low with or without ML1dn (0.094% with PE2, 0.12% with PE4), while the average efficiency of on-target editing increased from 9.7% for PE2 to 20% for PE4; (FIG. 45G, FIG. 53E). These data are consistent with previous reports noting the high DNA specificity of prime editing (Anzalone et al., 2019; Jin et al., 2021; Kim et al., 2020), and suggest that MLH1dn does not substantially increase off-target prime editing.

[0750] Next, it was asked whether transient inhibition of MMR with MLH1dn could induce genomic mutations independent of prime editor activity. In humans, MMR deficiency is a risk factor for colorectal cancer and most frequently manifests as mutations altering the length of repetitive microsatellite sequences within the genome (Fishel et al., 1993; Leach et al., 1993; Parsons et al., 1993). Because errors from microsatellite replication are repaired almost exclusively by MMR (Strand et al., 1993; Tran et al., 1997), microsatellite instability is used clinically as a measure of MMR activity (Bacher et al., 2004; Umar et al., 2004).

[0751] Microsatellite instability was evaluated by high-throughput sequencing of 17 mononucleotide tracts previously shown to be responsive to MMR inhibition and used as clinical biomarkers for MMR deficiency (Hempelmann et al., 2015). These microsatellite loci were analyzed in HAP1 cells, HeLa cells and in MMR-deficient HCT1 16 cells. HCT116 cells exhibited substantially shorter microsatellite lengths on average (13.9-nt) than HAP1 or HeLa cells (18.4-nt; FIG. 45H, FIG. 53F). To gauge whether this assay can also detect a shorter duration of MMR deficiency in the same cell type, microsatellite instability was compared in wild-type HAP1 cells and monoclonal HAP1 cells grown for 2 months (˜60 cell divisions) following knockout of MSH2. These MMR knockout cells exhibited a 0.24-nt average decrease in microsatellite length (FIG. 45H, FIG. 53F), demonstrating that even recent MMR impairment can be detected through the accumulation of microsatellite length erosion.

[0752] To assess the effect of transient MLH1dn expression as used in PE4 and PE5 systems, microsatellite instability was next measured in MMR-proficient HeLa cells 3 days after transfection with plasmids encoding PE2 or PE4. Although MLH1dn improved prime editing efficiency from 1.3% (PE2) to 7.6% (PE4) at the on-target locus (FIG. 51G), average microsatellite lengths were indistinguishable in PE2-treated cells compared to in PE4-treated cells (<0.01 nt of difference; FIG. 45H, FIG. 53F). These data indicate that transient MLH1dn expression can enhance prime editing without stimulating detectable instability at 17 microsatellites used for clinical diagnosis of MMR deficiency. As microsatellite repeats are up to 10⁵-fold more susceptible to MMR inhibition than the rest of the genome on average (Strand et al., 1993; Tran et al., 1997), these findings suggest that the PE4 and PE5 editing systems that use transient MLH1dn expression, including MLH1dn mRNA co-delivery described below, can enhance on-target editing without substantial off-target mutational burden.

PEmax Systems with Optimized Architectures and Synergy with Engineered pegRNAs

[0753] To further improve prime editing, the PE2 protein was optimized by varying RT codon usage, mutations within the SpCas9 domain, the length and composition of peptide linkers between nCas9 and RT, and the location, composition, and number of NLS sequences (FIGS. 56A-56B). Among 21 such variants tested, the greatest enhancement in editing efficiency was observed from a prime editor architecture that uses a human codon-optimized RT, a 34-aa linker containing a bipartite SV40 NLS (Wu et al., 2009), an additional C-terminal c-Myc NLS (Dang and Lee, 1988), and R221K N394K mutations in SpCas9 previously shown to improve Cas9 nuclease activity (Spencer and Zhang, 2017) (FIG. 46A, FIG. 56A). This optimized prime editor architecture was designated as PEmax (SEQ ID NO: 99 disclosed herein; also see schematic of FIG. 54A). At seven target sites tested in HeLa cells, this optimized prime editor architecture (hereafter referred to as PEmax) outperforms other improved prime editor variants, including PE2*, which includes additional NLS sequences (Liu et al., 2021), and CMP-PE-V1, which contains high-mobility peptides (Park et al., 2021) (FIGS. 56B-56D). Inserting high-mobility peptides into PEmax (CMP-PEmax) did not further improve prime editing (FIGS. 56C-56D).

[0754] Across seven substitution edits targeting different loci, using the PEmax architecture with the PE2 system (PE2max) increased the average frequency of intended editing by 2.3-fold in HeLa cells and 1.2-fold in HEK293T cells over the original PE2 architecture (FIG. 52B). Similarly, PE3 using the PEmax architecture (PE3max) increased average editing efficiency over PE3 by 2.8-fold in HeLa cells and 1.2-fold in HEK293T cells (FIGS. 53B and 56C). PE3max also slightly reduced average edit:indel purity by 1.2-fold in both cell types, which may reflect enhanced nickase activity from the Cas9 R221K and N394K mutations within the PEmax architecture (Spencer and Zhang, 2017).

[0755] It was also observed that PE4max (PE4 using the PEmax architecture) enhanced average editing frequencies over PE4 by 1.9-fold in HeLa cells and by 1.1-fold in HEK293T cells (FIG. 56E). Finally, PE5max (PE5 using the PEmax architecture) similarly increased average editing efficiency over PE5 by 2.2-fold in HeLa cells and 1.2-fold in HEK293T cells.

[0756] In a separate improvement to prime editing, engineered pegRNAs (epegRNAs) were recently developed, which contain an additional 3′ RNA structural motif that increases prime editing efficacy (Nelson et al., 2021) (FIG. 46C). To assess whether optimized PE4max and PE5max systems can synergize with epegRNAs. PE4max and PE5max were tested in combination with epegRNAs in HeLa and HEK293T cells. Across seven substitution edits targeting different loci, epegRNAs improved PE4max editing efficiency over normal pegRNAs by an average of 2.5-fold in HeLa cells and 1.5-fold in HEK293T cells (FIG. 46B). Similarly, epegRNAs enhanced PE5max editing over normal pegRNAs by 1.4-fold in HeLa cells and 1.1-fold in HEK293T cells, without affecting edit:indel purity.

[0757] Combining all enhancements to prime editing systems described above—MLH1dn, PEmax, and epegRNAs—dramatically improved prime editing performance. PE4max with epegRNAs enhanced editing efficiency by an average of 72-fold in MMR-proficient HeLa cells and 3.5-fold in MMR-deficient HEK293T cells relative to PE2 with normal pegRNAs (FIG. 46B). PE5max with epegRNAs also improved editing efficiency over PE3 with pegRNAs on average by 12-fold in HeLa cells and 1.6-fold in HEK293T cells, with outcome purity increasing on average by 4.6-fold in HeLa cells and 3.3-fold in HEK293T cells. Collectively, these results demonstrate that combining PE4/PE5. PEmax, and epegRNA approaches can greatly enhance prime editing efficiency and outcome purity.

Prime Editing of Disease-Relevant Loci and Cell Types with PE4 and PE5

[0758] To establish the applicability of these improved editing systems, PE4max and PE5max were applied to edit therapeutically relevant loci in wild-type HeLa and HEK293T cells. First, a silent G⋅C-to-A⋅T transversion was made at the 6^{th} codon of HBB, which is mutated in sickle cell disease patients (Ingram, 1956). Second, the G127V allele (a G⋅C-to-T⋅A transversion) was installed in PRNP that confers resistance to prion disease (Asante et al., 2015; Mead et al., 2009). Third, a silent C⋅G-to-T⋅A mutation was introduced at a CDKL5 site known to contain a causative mutation for CDKL5 deficiency disorder, a severe neurodevelopmental condition (Olson et al., 2019). Fourth, the CXCR4 P191A allele (a G⋅C-to-C⋅G edit) that inhibits HIV infection in human cells was installed (Liu et al., 2018). Fifth, the IL2RB H134D Y135F (non-adjacent T⋅A-to-A⋅T and G⋅C-to-C⋅G edits) variant that enables orthogonal IL-2 receptor responsiveness for adoptive T cell transfer therapy was generated (Sockolosky et al., 2018). Lastly, the BCL 11 A repressor binding site within the HBG1 and HBG2 fetal hemoglobin gene promoters was recoded to a GATA1 transcriptional activator motif (non-adjacent G⋅C-to-A⋅T and C⋅G-to-A⋅T edits), which in principle could induce fetal hemoglobin expression for treatment of hemoglobinopathies (Amato et al., 2014). Sequences are shown in Table 4, below.

TABLE 4
Sequences Used for Prime Editing of Disease-Relevant Loci and Cell Types

| | | SEQ |
|---|---|---|
| Oligonucleotides | Sequence | ID NO: |
| CDKL5 | mG*mA*mG*rGrGrArCrUrCrCrUrArGrArGrGrArCrUrGrGrUrUrUrUrArGrArGrCrUr | 237 |
| c.1412delA | ArGrArArArUrArGrCrArArGrUrUrArArArArUrArArGrGrCrUrArGrUrCrCrGrUrUrAr | |
| correction with | UrCrArArCrUrUrGrArArArArArGrUrGrGrCrArCrCrGrArGrUrCrGrGrUrGrCrArUrAr | |
| silent edit | UrUrGrArCrArCrArArUrUrCrCrCrCrArArUrCrCrUrCrUrArGrGrArGrUrCrArArArAr | |
| epegRNA | ArCrArCrGrUrCrArGrGrGrUrCrArGrGrArGrCrCrCrCrCrCrCrCrCrUrGrCrArCrCrCr | |
| | ArGrGrArArArArCrCrCrUrCrArArArGrUrCrGrGrGrGrGrGrCrArA*mC*mC*mC | |
| CDKL5 +86 nick | mG*mC*mA*rGrArArCrCrGrCrCrArCrUrCrArUrUrCrArGrUrUrUrUrArGrArGrCrUr | 238 |
| sgRNA | ArGrArArArUrArGrC:ArArGrUrUrArArArArUrArArGrGrCrUrArGrUrCrCrGrUrUrAr | |
| | UrCrArArCrUrUrGrArArArArArGrUrGrGrCrArCrCrGrArGrUrCrGrGrUrGrCrUmU*m | |
| | U*mU | |
| CDKL5 −3 nick | mA*mC*mA*rCrArArUrUrCrCrCrCrArArUrCrCrUrCrUrGrUrUrUrUrArGrArGrCrUr | 239 |
| sgRNA (for | ArGrArArArUrArGrCrArArGrUrUrArArArArUrArArGrGrCrUrArGrUrCrCrGrUrUrAr | |
| PE3b/PE5b) | UrCrArArCrUrUrGrArArArArArGrUrGrGrCrArCrCrGrArGrUrCrGrGrUrGrCrUmU*m | |
| | U*mU | |
| PRNP G127V | mG*mC*mA*rGrUrGrGrUrGrGrGrGrGrGrCrCrUrUrGrGrGrUrUrUrUrArGrArGrCrUr | 240 |
| install pegRNA | ArGrArArArUrArGrCrArArGrUrUrArArArArUrArArGrGrCUrArGrUrCrCrGrUrUrAr | |
| | UrCrArArCrUrUrGrArArArArArGrUrGrGrCrArCrCrGrArGrUrCrGrGrUrGrCrArUrGr | |
| | UrArGrArCrGrCrCrArArGrGrCrCrCrCrCrC*mA*mC*mC | |
| PRNP +72 nick | mG*mC*mA*rUrGrUrUrUrUrCrArCrGrArUrArGrUrArArGrUrUrUrUrArGrArGrCrUr | 241 |
| sgRNA | ArGrArArArUrArGrC:ArArGrUrUrArArArArUrArArGrGrCrUrArGrUrCrCrGrUrUrAr | |
| | UrCrArArCrUrUrGrArArArArArGrUrGrGrCrArCrCrGrArGrUrCrGrGmUrGrCrUmU* | |
| | mU*mU | |
| FANCF +5 G to | mG*mG*mA*rArUrCrCrCrUrUrCrUrGrCrArGrCrArCrCrGrUrUrUrUrArGrArGrCrUr | 242 |
| T pegRNA | ArGrArArArUrArGrCrArArGrUrUrArArArArUrArArGrGrCrUrArGrUrCrCrGrUrUrAr | |
| | UrCrArArCrUrUrGrArArArArArGrUrGrGrCrArCrCrGrArGrUrCrGrGrUrGrCrGrGrAr | |
| | ArArArGrCrGrArUrCrArArGrGrUrGrCrUrGrCrArGrArArG*mG*mG*mA | |
| FANCF +48 nick | mG*mG*mG*rGrUrCrCrCrArGrGrUrGrCrUrGrArCrGrUrGrUrUrUrUrArGrArGrCrUr | 243 |
| sgRNA | ArGrArArArUrArGrCrArArGrUrUrArArArArUrArArGrGrCrUrArGrUrCrCrGrUrUrAr | |
| | UrCrArArCrUrUrGrArArArArArGrUrGrGrCrArCrCrGrArGrUrCrGrGrUrGrCrUmU*m | |
| | U*mU | |
| RNF2 +1 T | mG*mU*mC*rArUrCrUrUrArGrUrCrArUrUrArCrCrUrGrGrUrUrUrUrArGrArGrCrUr | 244 |
| insertion | ArGrArArArUrArGrCrArArGrUrUrArArArArUrArArGrGrCrUrArGrUrCrCrGrUrUrAr | |
| pegRNA | UrCrArArCrUrUrGrArArArArArGrUrGrGrCrArCrCrGrArGrUrCrGrGrUrGrCrArArCr | |
| | GrArArCrArCrCrUrCrArGrArGrUrArArUrGrArCrUrArArG*mA*mU*mG | |
| RNF2 +41 nick | mU*mC*mA*rArCrCrArUrUrArArGrCrArArArArCrArUrGrUrUrUrUrArGrArGrCrUr | 245 |
| sgRNA | ArGrArArArUrArGrCrArArGrUrUrArArArArUrArArGrGrCrUrArGrUrCrCrGrUrUrAr | |
| | UrCrArArCrUrUrGrArArArArArGrUrGrGrCrArCrCrGrArGrUrCrGrGrUrGrCrUmU*m | |
| | U*mU | |
| CXCR4 P191A | mC*mA*mA*rCrCrArCrCrCrArCrArArGrUrCrArUrUrGrGrUrUrUrUrArGrArGrCrUr | 246 |
| install pegRNA | ArGrArArArUrArGrCrArArGrUrUrArArArArUrArArGrGrCrUrArGrUrCrCrGrUrUrAr | |
| | UrCrArArCrUrUrGrArArArArArGrUrGrGrCrArCrCrGrArGrUrCrGrGrUrGrCrUrGrAr | |
| | CrCrGrCrUrUrCrUrArCrGrCrCrArArUrGrArCrUrUrGrUrGrGrGrU*mG*mG*mU | |
| CXCR4 +43 nick | mC*mA*mU*rCrUrUrUrGrCrCrArArCrGrUrCrArGrUrGrGrUrUrUrUrArGrArGrCrUr | 247 |
| sgRNA | ArGrArArArUrArGrCrArArGrUrUrArArArArUrArArGrGrCrUrArGrUrCrCrGrUrUrAr | |
| | UrCrArArCrUrUrGrArArArArArGrUrGrGrCrArCrCrGrArGrUrCrGrGrUrGrCrUmU*m | |
| | U*mU | |
| IL2RB H134D | mC*mC*mA*rGrGrUrGrUrCrUrUrUrCrArArArGrUrArGrGrUrUrUrUrArGrArGrCrUr | 248 |
| Y135F install | ArGrArArArUrArGrCrArArGrUrUrArArArArUrArArGrGrCrUrArGrUrCrCrGrUrUrAr | |
| pegRNA | UrCrArArCrUrUrGrArArArArArGrUrGrGrCrArCrCrGrArGrUrCrGrGrUrGrCrUrCrCr | |
| | CrArArGrCrCrUrCrCrGrArCrUrUrCrUrUrUrGrArArArGrA*mC*mA*mC | |
| IL2RB +55 nick | mC*mU*mC*rCrCrUrCrCrArArGrUrUrGrUrCrCrArCrGrGrUrUrUrUrArGrArGrCrUr | 249 |
| sgRNA | ArGrArArArUrArGrCrArArGrUrUrArArArArUrArArGrGrCrUrArGrUrCrCrGrUrUrAr | |
| | UrCrArArCrUrUrGrArArArArArGrUrGrGrCrArCrCrGrArGrUrCrGrGrUrGrCrUmU*m | |
| | U*mU | |

[0759] Across these six disease-relevant edits, it was observed that PE4max increased average prime editing efficiency over PE2 by 29-fold in HeLa cells and 2.1-fold in HEK293T cells (FIG. 46D). Notably, PE4max editing efficiencies (8.6% editing with 0.19% indels in HeLa cells, and 20% editing with 0.26% indels in HEK293T cells) were similar to or exceeded those of PE3 (4.5% editing with 1.5% indels in HeLa cells, and 24% editing with 5.4% indels in HEK293T cells), but with far fewer indels. In addition. PE5max improved disease-relevant allele conversion over PE3 by an average of 6.1-fold in HeLa cells and 1.5-fold in HEK293T cells, and enhanced edit:indel purity by 6.4-fold in HeLa cells and by 3.5-fold in HEK293T cells (FIG. 46D). Taken together, these results demonstrate that PE4max and PE5max support substantially higher prime editing performance compared to PE2 and PE3 at gene targets relevant to human disease in commonly used cell lines.

[0760] Next, PE4 and PE5 editing systems were evaluated in a cell model of genetic disease and in primary human cells. First, the pathogenic CDKL5 c.1412delA mutation in human induced pluripotent stem cells (iPSCs) derived from a patient heterozygous for this allele was corrected (Chen et al., 2021). Electroporation of these iPSCs with PE3 components (in vitro-transcribed PE2 mRNA and synthetic pegRNAs and nicking sgRNAs) yielded 17% correction of editable pathogenic alleles and 20% total indel products (FIG. 46E, FIG. 56F). Co-electroporation of these components with MLH1dn mRNA for PE5 editing elevated correction efficiency to 34% and lowered the frequency of indels to 6.1%. To further minimize indels, PE4 and PE5b strategies were also used. Without complementary-strand nicking, it was observed that MLH1dn improved allele correction from 4.0% (PE2) to 10% (PE4) with few indels (<0.34%) (FIG. 46E, FIG. 56F). Similarly, PE3b resulted in 13% editing of the mutant allele with 4.8% indels, while PE5b elevated editing to 27% with 3.8% indels. Across the PE4, PE5, and PE5b systems tested, MLH1dn enhances correction of the pathogenic CDKL5 c.1412delA mutation by 2.2-fold in efficiency and 3.6-fold in outcome purity in patient-derived iPSCs.

[0761] Second, primary T cells were electroporated from healthy human donors with PE2 mRNA, MLH1dn mRNA, and synthetic pegRNAs and nicking sgRNAs to introduce the protective PRNP G127V mutation, a G⋅C-to-T⋅A transversion at FANCF, or a 1-bp insertion of a T at RNF2. At these three sites, it was found that PE5 achieved an average of 41% editing efficiency with 12% indels, a substantial improvement from 22% editing efficiency and 26% indels with PE3 (FIG. 46F, FIG. 56G). PE4 and PE5 were also applied to install the protective CXCR4 P191A allele that prevents HIV infection (Liu et al., 2018), and the IL2RB H134D Y135F variant that enables orthogonal IL-2 T cell stimulation (Sockolosky el al., 2018). For these edits, PE4 increased the frequency of allele conversion over PE2 by an average of 3.6-fold with few indel byproducts (FIG. 46F. FIG. 56G). In addition, PE5 resulted in an average of 52% editing with 11% indels, compared to 44% editing with 17% indels with PE3, a 2.0-fold improvement in edit:indel ratio. Taken together, these results across six sites in human iPSCs and primary T cells establish PE4 and PE5 as enhanced prime editing systems that enable substantially greater editing efficiency and outcome purity in cell types relevant to the study and potential treatment of genetic disease.

### Discussion

[0762] Using pooled CRISPRi screens, it was discovered that MMR activity strongly suppresses the efficiency and outcome purity of substitution prime edits. Based on the results and insights from the CRISPRi screens and the role of MMR in suppressing editing with nucleotide substitution, the PE4 and PE5 systems were developed. Particularly, the PE4 and PE5 systems co-express MLH1dn to transiently inhibit MMR, enhance prime editing efficacy, and reduce indels without inducing substantial off-target genomic changes. Optimization of the prime editor protein resulted in a PEmax architecture that can synergize with PE4 and PE5 systems, as well as with epegRNAs (Nelson et al., 2021—incorporated herein by reference), to further enhance prime editing performance. Together, the model for DNA repair of prime editing supported by these findings, the PE4 and PE5 strategies developed to circumvent a prime editing bottleneck, and the improved PEmax prime editor architecture described here substantially advance the utility of prime editing for precision manipulation of the genome.

[0763] This work revealed that prime editing can install certain types of edits, including G⋅C-to-C⋅G transversions and substitutions of three or more contiguous bases, with higher efficiency due to the ability of the corresponding prime editing intermediates to evade MMR. In addition to edit type, other properties could also affect the sensitivity of prime editing to MMR, such as the sequence context of the target site. The state of the edited locus may also be important, as MMR more efficiently repairs early replicating euchromatin (Supek and Lehner, 2015) as well as lagging strand DNA during replication (Lujan et al., 2014).

[0764] While it is demonstrated that co-delivery of MLH1dn with prime editors enhances editing efficiency and precision, the studies presented herein on the role of MMR in determining prime editing outcomes coupled with insights into the types of prime editing intermediates that are repaired by MMR allows researchers to design prime editing experiments to evade MMR, even without expression of MLH1dn. For example, the data presented herein show that strategically installing additional nearby silent mutations can enhance prime editing outcomes by avoiding MMR reversal of prime editing intermediates, even with PE2 or PE3 systems. Other modalities for MMR inhibition may also prove beneficial for prime editing. Although no small molecules that selectively target MMR have been reported, chemical inhibitors would be useful in applications limited by MLH1dn delivery and could allow temporal control of MMR inhibition. For uses such as viral delivery that may maintain prime editor expression over a long duration, RNA interference offers another strategy for transient MMR knockdown.

[0765] PE4 and PE5 systems powerfully enhance prime editing in seven mammalian cell types tested, including patient-derived iPSCs and primary T cells. PE4 increases editing efficiency by an average of 7.7-fold over PE2 in MMR-proficient cell types, uniquely enabling appreciable levels of gene editing without generating DSBs from complementary-strand nicking. This improvement in combination with the PEmax architecture and epegRNAs can surpass editing frequencies of PE3 while maintaining few indel byproducts. PE4max with epegRNAs thus will be particularly useful for gene editing applications that cannot tolerate indel formation or are limited by delivery of nicking sgRNAs. In comparison, PE5 elevates editing efficiency over PE3 by an average 2.0-fold and editing outcome purity by approximately 3-fold in cells with active MMR, which includes most cell targets.

### Experimental Model and Subject Details

Culture conditions for immortalized cell lines

[0766] HEK293T, HeLa dCas9-BFP-KRAB, HeLa, HCT116, and N2A cells were cultured in Dulbecco's Modified Eagle Medium (DMEM) plus GlutaMAX (Thermo Fisher Scientific) supplemented with 10% fetal bovine serum (FBS) (Thermo Fisher Scientific). HeLa dCas9-BFP-KRAB cells were cultured in DMEM plus GlutaMAX supplemented with 10% FBS. 100 U mL-1 penicillin, and 100 μg mL-1 streptomycin (Thermo Fisher Scientific). K562 dCas9-BFP-KRAB and K562 cells were cultured in Roswell Park Memorial Institute (RPMI) 1640 medium (Thermo Fisher Scientific) supplemented with 10% FBS and 1% Penicillin-Streptomycin-Glutamine 100× (Thermo Fisher Scientific). All HAP1 cell types were cultured in Iscove's Modified Dulbecco's Medium (IMDM) plus GlutaMAX (Thermo Fisher Scientific) supplemented with 10% FBS. U2OS cells were cultured in McCoy's 5A medium (Gibco) supplemented with 10% FBS, 100 U mL⁻¹ penicillin, and 100 μg mL⁻¹ streptomycin (Thermo Fisher Scientific). HeLa dCas9-BFP-KRAB and K562 dCas9-BFP-KRAB cell lines were verified by short tandem repeat marker testing. All cell types were passaged every 2-3 days, maintained below 80% confluency, cultured at 37° C. with 5% CO₂, and tested negative for mycoplasma.

### Isolation of Primary Human T Cells

[0767] Peripheral blood mononuclear cells (PBMCs) were isolated from buffy coat of healthy donors (Memorial Blood Centers in St. Paul, Minnesota) by density centrifugation using Lymphoprep density gradient medium (STEMCELL Technologies) and SepMate tubes (STEMCELL Technologies). T cells were isolated from PBMCs using the EasySep Human T Cell Isolation Kit (STEMCELL Technologies).

### Culture Conditions for Human Patient-Derived Induced Pluripotent Stem Cells

[0768] All iPSC culturing work was performed by staff at the Human Neuron Core at Boston Children's Hospital following institutional guidelines and under institutional approvals (IRB #: P00016119). A clonal iPS cell line, MAN0855-0l #A (Coriell Institute #0R00007), was expanded from a female CDKL5 deficiency disorder patient carrying a heterozygous CDKL5 c.1412delA p.D471fs mutation on the X chromosome (Chen et al., 2021). MAN0855-01 #A was previously verified to express the mutant CDKL5 transcript by Sanger sequencing of cDNA. The MAN0855-01 #A iPS cell line was cultured in StemFlex medium (Thermo Fisher Scientific) on Geltrex (Thermo Fisher Scientific) diluted 1:50 in DMEM/F12 (Thermo Fisher Scientific) and coated according to the manufacturer's protocol. For regular maintenance. iPS cell colonies were clump-passaged using Gentle Cell Dissociation Reagent (STEMCELL Technologies) at 80% confluency every 5-7 days.

### Method Details

### General Methods and Molecular Cloning

[0769] Lentiviral transfer plasmids and plasmids for mammalian expression of prime editors and other proteins were cloned using uracil excision (USER) assembly (Cavaleiro et al., 2015). Briefly, DNA fragments were amplified with deoxyuracil-containing primers (Integrated DNA Technologies) using the uracil tolerant Phusion U Green Multiplex PCR Master Mix (Thermo Fisher Scientific). Deoxyuracil-incorporated DNA fragments were assembled with USER enzyme (New England BioLabs) and DpnI (New England BioLabs) according to the manufacturer's protocol using junctions with a melting temperature of 42-60° C., followed by transformation into cells. All prime editor constructs were cloned into the pCMV-PE2 vector backbone (Anzalone et al., 2019) (Addgene #132775) under constitutive expression from a CMV promoter. All prime editor constructs also contained the following mutations within the MMLV RT: D200N, T306K, W313F, T330P, and L603W. All DNA repair protein and RFP expression constructs were cloned into vectors under constitutive expression from an EFla promoter. Human MSH2, MSH6, PMS2, and MLH1 sequences were subcloned from the plasmids pFB1_hMSH2 (Addgene #129423), pFB1_hMSH6 (Addgene #129424), pFB1_PMS2 (Addgene #129425), and pFB1_MLH1 (Addgene #129426) (Geng et al., 2011). Human CDKN1A sequence was subcloned from the plasmid Flag p21 WT (Addgene #16240) (Zhou et al., 2001). Codon-optimized MLH1 sequences for human cell and mouse cell expression were designed using GenSmart Codon Optimization (Genscript) and ordered as gBlock gene fragments (Integrated DNA Technologies).

[0770] Plasmids for mammalian expression of pegRNAs or sgRNAs were cloned using Golden Gate assembly (Engler et al., 2008) as previously described (Anzalone et al., 2019). Briefly, a guide RNA vector backbone for human U6 promoter expression was digested overnight with BsaI-HFv2 (New England BioLabs) according to the manufacturer's protocol, and linearized product was purified by electrophoresis with a 1% agarose gel using the QIAquick Gel Extraction Kit (QIAGEN). Oligonucleotides (Integrated DNA Technologies) for the spacer sequence, guide RNA scaffold, and 3′ extension were annealed, assembled with linearized U6 backbone DNA using T4 DNA ligase (New England BioLabs) according to the manufacturer's protocol, and transformed into cells. Only guide RNA scaffold oligonucleotides were purchased with 5′ phosphorylation modifications. Some plasmids encoding pegRNAs and epegRNAs were synthesized by Twist Bioscience. A list of pegRNAs and nicking sgRNAs used in this work is provided in Table 7.

[0771] Unless otherwise noted, assembled plasmids were transformed into One Shot Mach1 cells (Thermo Fisher Scientific) and grown on Luria-Bertani (LB) or 2×YT agar with 50 μg ml⁻¹ carbenicillin (Gold Biotechnology). Plasmid sequences were fully verified by Sanger sequencing (Quintara Biosciences), and bacteria containing verified plasmids were grown in 2×YT medium with 100 μg ml⁻¹ carbenicillin (Gold Biotechnology). Plasmid DNA were isolated using the QIAGEN Plasmid Plus Midi Kit or QIAGEN Plasmid Plus Maxi Kit with endotoxin removal and 2× the recommended amount of RNase A in Buffer PL. Some pegRNA and sgRNA plasmid DNA were isolated with the PureYield Plasmid Miniprep System (Promega Corporation) with endotoxin removal. Plasmid DNA purified using the PureYield Plasmid Miniprep System were only used for HEK293T and HeLa cell transfections. All plasmids were eluted in nuclease-free water (QIAGEN) and quantified using a NanoDrop One UV-Vis spectrophotometer (Thermo Fisher Scientific).

### Lentivirus Production for Generating Cell Lines

[0772] To package lentivirus for generating stable cell lines, HEK293T cells were seeded on 6-well plates (Corning) at 7.5×10⁵ cells per well in DMEM supplemented with 10% FBS. At 60% confluency 16 h after seeding, cells were transfected with 12 μL Lipofectamine 2000 (Thermo Fisher Scientific) according to the manufacturer's protocol and 1.33 μg lentiviral transfer plasmid, 0.67 μg pMD2.G (Addgene #12259), and 1 μg psPAX2 (Addgene #12260). 6 h after transfection, media was exchanged with DMEM supplemented with 10% FBS. 48 h after transfection, viral supernatant was centrifuged at 3000 g for 15 min to remove cellular debris, filtered through a 0.45 μm PVDF filter (Corning), and stored at −80° C.

Design and Construction of HEK293T Line with Integrated HBB Coding Region

[0773] A lentiviral transfer plasmid was designed and cloned to contain the human HBB coding region (CDS) and a PuroR-T2A-BFP marker under expression from an EFla promoter (pEF1α). Lentivirus carrying this cassette were produced from HEK293T cells as described above. To stably integrate the HBB CDS, 6×10⁵ HEK293T cells were infected with lentivirus in 6-well plates (Corning) with DMEM supplemented with 10% FBS and 10 μg mL¹ polybrene (Sigma-Aldrich). BFP fluorescence was monitored daily using a CytoFLEX S Flow Cytometer (Beckman Coulter) to ensure an MOI of 0.1 and single copy integration. Following infection for 2 days, HEK293T cells were selected in 2 μg μL⁻¹ puromycin (Thermo Fisher Scientific) for 3 days and stable transduction was confirmed by measuring BFP fluorescence. The resulting cell line was used to optimize pegRNAs for prime editing at an integrated HBB site with SaPE2. To measure editing, a 214-bp amplicon of the integrated HBB CDS locus was PCR amplified. Amplification of the genomic HBB locus with these primers yields a differently sized 1064-bp amplicon.

Design and Construction of HeLa Line with CRISPRi sgRNA and Prime Edit Target

[0774] The lentiviral transfer plasmid backbone for prime editing Repair-seq screens (pPC1000) was designed and cloned to contain a universal prime edit site and express a control S. pyogenes sgRNA for CRISPRi targeting. The prime edit site consisted of an HBB target protospacer for Sa-pegRNA that is flanked by two complementary-strand Sa-sgRNA protospacers derived from the Saccharomyces cerevisiae genome. These protospacers were situated such that SaPE2-sgRNA complexes nick 50-bp upstream and 50-bp downstream of the nick formed by SaPE2-pegRNA. This 234-bp edit site was positioned adjacently to the sequence of an EGFP-targeting control S. pyogenes sgRNA under expression from a mouse U6 promoter such that sgRNA and edit site could be amplified by PCR in the same 453-bp amplicon. pPC1000 also contained an pEF1α-PuroR-T2A-BFP selection marker.

[0775] Lentivirus encoding the pPC1000 cassette were produced from HEK293T cells as described above. For stable integration, 2.5×10⁵ HeLa dCas9-BFP-KRAB cells were infected with pPC1000 lentivirus in 6-well plates (Corning) with DMEM supplemented with 10% FBS and 10 μg mL⁻¹ polybrene (Sigma-Aldrich). BFP fluorescence was monitored with a CytoFLEX S Flow Cytometer (Beckman Coulter) to ensure an MOI of 0.1 and single copy integration. Following 2 days of infection, cells were selected in 2 μg μL⁻¹ puromycin (Thermo Fisher Scientific) for 3 days and stable transduction was confirmed by measuring BFP fluorescence. The resulting HeLa dCas9-BFP-KRAB cell line with integrated pPC1000 sequence was used to pilot prime editing conditions, Sa-pegRNAs, and Sa-sgRNAs for Repair-seq screens.

### Transfection of HEK293T, HeLa, HCT116, and N2A Cells

[0776] Unless otherwise noted, HEK293T cells were seeded on 96-well plates (Corning) at 1.6-1.8×10⁴ cells per well in DMEM plus GlutaMAX supplemented with 10% FBS. Between 16 and 24 h after seeding, cells were transfected at 60-80% confluency with 0.5 μL Lipofectamine 2000 (Thermo Fisher Scientific) according to the manufacturer's protocol and 200 ng prime editor plasmid, 66 ng pegRNA plasmid, 22 ng sgRNA plasmid (when required), and 100 ng for RFP or MMR protein expression (when required).

[0777] For arrayed experiments, HeLa dCas9-BFP-KRAB and HeLa cells were seeded on 96-well plates (Corning) at 8×10³ cells per well in DMEM plus GlutaMAX supplemented with 10% FBS. Between 16 and 24 h after seeding, cells were transfected at 60-80% confluency with 0.3 μL TransIT-HeLa reagent (Mirus Bio) according to the manufacturer's protocol and 56.25 ng prime editor plasmid bearing a P2A-BlastR selection marker, 18.75 ng pegRNA plasmid, 6.25 sgRNA plasmid (when required), and 28.1 ng human codon-optimized MLH1dn plasmid (when required). 24 h following transfection, 10 ng μL⁻¹ blasticidin (Thermo Fisher Scientific) was added to each well to select for cells expressing prime editor.

[0778] HCT116 cells were seeded on 96-well plates (Corning) at 1.6×10⁴ cells per well in DMEM plus GlutaMAX supplemented with 10% FBS. Between 16 and 20 h after seeding, cells were transfected at 60-80% confluency with 0.5 μL Lipofectamine 3000 plus 0.8 μL P3000 reagent (Thermo Fisher Scientific) according to the manufacturer's protocol and 200 ng prime editor plasmid bearing a P2A-BlastR selection marker, 66 ng pegRNA plasmid, 22 ng sgRNA plasmid (when required), and 100 ng MLH1dn plasmid (when required). The day after transfection, media was replaced with fresh DMEM plus GlutaMAX supplemented with 10% FBS and 10 ng μL⁻¹ blasticidin (Thermo Fisher Scientific) to select for cells expressing prime editor.

[0779] N2A cells were seeded on 96-well plates (Corning) at 1.6×10⁴ cells per well in DMEM plus GlutaMAX supplemented with 10% FBS. Between 16 and 20 h after seeding, cells were transfected at 60-80% confluency with 0.5 μL Lipofectamine 2000 (Thermo Fisher Scientific) according to the manufacturer's protocol and 175 ng prime editor plasmid, 50 ng pegRNA plasmid, 20 ng sgRNA plasmid (when required), and 87.5 ng plasmid encoding human codon-optimized hMLH1dn or mouse codon-optimized mMLH1dn when required. Genomic DNA was extracted 72 h following transfection.

### Electroporation of HAP1, K562, and U2OS Cels

[0780] HAP1 cells were nucleofected using the SE Cell Line 4D-Nucleofector X Kit S (Lonza) according to the manufacturer's protocol with 4×10⁵ cells (program DZ-113), 300 ng PE2-P2A-BSD, 100 ng pegRNA plasmid, and 33 ng sgRNA plasmid (when required). After nucleofection, cells were cultured in 48-well plates (Corning) with IMDM plus GlutaMAX supplemented with 10% FBS. The day after nucleofection, media was replaced with fresh IMDM plus GlutaMAX supplemented with 10% FBS and 10 ng μL⁻¹ blasticidin (Thermo Fisher Scientific) to select for cells expressing prime editor.

[0781] K562 cells were nucleofected using the SF Cell Line 4D-Nucleofector X Kit S (Lonza) according to the manufacturer's protocol with 5×10⁵ cells (program FF-120), 800 ng prime editor plasmid, 200 ng pegRNA plasmid, 83 ng sgRNA plasmid (when required), and 400 ng MLH1dn plasmid (when required). After nucleofection, cells were cultured in 6-well plates (Corning) with RPMI 1640 medium supplemented with 10% FBS and 292 μg mL⁻¹ L-Glutamine (Thermo Fisher Scientific).

[0782] U2OS cells were nucleofected using the SE Cell Line 4D-Nucleofector X Kit S (Lonza) according to the manufacturer's protocol with 2×10⁵ cells (program DN-100), 1600 ng PE2 or PE2-P2A-MLH1dn plasmid, 400 ng pegRNA plasmid, and 166 ng sgRNA plasmid (when required). After nucleofection, cells were cultured in 12-well or 24-well plates (Corning) with McCoy's 5A medium supplemented with 10% FBS.

### Genomic DNA Extraction

[0783] Unless otherwise noted, HEK293T, HeLa dCas9-BFP-KRAB, HeLa, HCT116, N2A, HAP1, K562, and U2OS cells were cultured for 72 h after transfection or nucleofection before genomic DNA was isolated. Cells were washed once with PBS (Thermo Fisher Scientific) and lysed with gDNA lysis buffer (10 mM Tris-HCl, pH 8.0; 0.05% SDS; 800 units μL⁻¹ proteinase K (New England BioLabs)) at 37° C. for 1.5-2 h. followed by enzyme inactivation at 80° C. for 30 min.

### High-Throughput Amplicon Sequencing of Genomic DNA Samples

[0784] To assess gene editing, loci were amplified from genomic DNA samples via two rounds of PCR and deep sequenced. Briefly, an initial PCR step (PCR1) amplified the genomic sequence of interest using primers (Integrated DNA Technologies) containing Illumina forward and reverse adapters. Each 20 μL PCR 1 reaction was performed with 500 nM of each primer, 0.8 to 1.0 μL genomic DNA, 1×SYBR Green (Thermo Fisher Scientific), and 10 μL Q5 High-Fidelity 2× Master Mix (New England BioLabs) on a CFX96 Touch Real-Time PCR Detection System (Bio-Rad Laboratories) with the following thermocycling conditions: 98° C. for 2 min, 29-31 cycles of [98° C. for 10 s, 61° C. for 20 s, and 72° C. for 30 s], followed by 72° C. for 2 min. PCR 1 reactions were monitored with SYBR Green fluorescence to avoid over-amplification. A list of primers used for PCR1 reactions is provided in Table 8.

TABLE 8
Primers Used for PCR1 Reactions

| | | SEQ ID |
|---|---|---|
| Primer description | Primer sequence (5′-3′) | NO: |
| Lentiviral HBB CDS site-PCR1 | ACACTCTTTCCCTACACGACGCTCTTCCGATCTAAATT | 250 |
| forward | GGACAGCAAGAAAGCGAGCTTAG | |
| Lentiviral HBB CDS site-PCR1 | TGGAGTTCAGACGTGTGCTCTTCCGATCTCTTTGCCAC | 251 |
| reverse | ACTGAGTGAGCTG | |
| Lentiviral pPC1000 edit site-PCR1 | ACACTCTTTCCCTACACGACGCTCTTCCGATCTNNNNG | 252 |
| forward | CCTTTAGTGATGGCCTGGCTCACCTG | |
| Lentiviral pPC1000 edit site-PCR1 | TGGAGTTCAGACGTGTGCTCTTCCGATCTTAGGCGGCC | 253 |
| reverse | GCTGCACGTAG | |
| Lentiviral pPC1000 CRISPRi sgRNA | ACACTCTTTCCCTACACGACGCTCTTCCGATCTATCCC | 254 |
| and edit site | TTGGAGAACCACCTTGTTG | |
| (for Repair-seq screens)- | | |
| PCR1 forward | | |
| Lentiviral pPC1000 CRISPRi sgRNA | TGGAGTTCAGACGTGTGCTCTTCCGATCTCAACCAAC | 255 |
| and edit site | GCTATCGGCATGG | |
| (for Repair-seq screens)- | | |
| PCR1 reverse | | |
| HEK3 locus-PCR1 forward | ACACTCTTTCCCTACACGACGCTCTTCCGATCTNNNNC | 256 |
| | AGGGAAACGCCCATGCAATTAG | |
| HEK3 locus-PCR1 reverse | TGGAGTTCAGACGTGTGCTCTTCCGATCTCTCTGTTGA | 257 |
| | GCTCGACCCTGAA | |
| EMX1 locus-PCR1 forward | ACACTCTTTCCCTACACGACGCTCTTCCGATCTNNNNC | 258 |
| | AGCTCAGCCTGAGTGTTGA | |
| EMX1 locus-PCR1 reverse | TGGAGTTCAGACGTGTGCTCTTCCGATCTCTCGTGGGT | 259 |
| | TIGTGGTTGC | |
| RNF2 locus-PCR1 forward | ACACTCTTTCCCTACACGACGCTCTTCCGATCTNNNNT | 260 |
| | TAGCCAACATACAGAAGTCAGG | |
| RNF2 locus-PCR1 reverse | TGGAGTTCAGACGTGTGCTCTTCCGATCTAGACCATA | 261 |
| | GCACTTCCCTTCC | |
| FANCF locus-PCR1 forward | ACACTCTTTCCCTACACGACGCTCTTCCGATCINNNNC | 262 |
| | GATGGATGTGGCGCAGGTAG | |
| FANCF locus-PCR1 reverse | TGGAGTTCAGACGTGTGCTCTTCCGATCTAGACGCTG | 263 |
| | GGAGATTGACATGC | |
| RUNX1 locus-PCR1 forward | ACACTCTTTCCCTACACGACGCTCTTCCGATCTNNNNT | 264 |
| | CACAAACAAGACAGGGAACTG | |
| RUNX1 locus-PCR1 reverse | TGGAGTTCAGACGTGTGCTCTTCCGATCTAGATGTAG | 265 |
| | GGCTAGAGGGGTG | |
| DNMT1 locus-PCR1 forward | ACACTCTTTCCCTACACGACGCTCTTCCGATCTNNNNC | 266 |
| | ACAACAGCTTCATGTCAGCC | |
| DNMT1 locus-PCR1 reverse | TGGAGTTCAGACGTGTGCTCTTCCGATCTACGTTAATG | 267 |
| | TTTCCTGATGGTCC | |
| VEGFA locus-PCR1 forward | ACACTCTTTCCCTACACGACGCTCTTCCGATCTNNNNA | 268 |
| | CTTGGTGCCAAATTCTTCTCC | |
| VEGFA locus-PCR1 reverse | TGGAGTTCAGACGTGTGCTCTTCCGATCTAAAGAGGG | 269 |
| | AATGGGCTTTGGA | |
| HEK4 locus-PCR1 forward | ACACTCTTTCCCTACACGACGCTCTTCCGATCTNNNNG | 270 |
| | AACCCAGGTAGCCAGAGAC | |
| HEK4 locus-PCR1 reverse | TGGAGTTCAGACGTGTGCTCTTCCGATCTTCCTTTCAA | 271 |
| | CCCGAACGGAG | |
| HBB locus-PCR1 forward | ACACTCTTTCCCTACACGACGCTCTTCCGATCTNNNNG | 252 |
| | CCTTTAGTGATGGCCTGGCTCACCTG | |
| HBB locus-PCR1 reverse | TGGAGTTCAGACGTGTGCTCTTCCGATCTGTCTTCTCT | 272 |
| | GTCTCCACATGCC | |
| PRNP locus-PCR1 forward | ACACTCTTTCCCTACACGACGCTCTTCCGATCTNNNNG | 273 |
| | TCAGTGGAACAAGCCGAGT | |
| PRNP locus-PCR1 reverse | TGGAGTTCAGACGTGTGCTCTTCCGATCTACTTGGTTG | 274 |
| | GGGTAACGGTG | |
| CDKL5 locus-PCR1 forward | ACACTCTTTCCCTACACGACGCTCTTCCGATCINNNNC | 275 |
| | TTCAGAAGGCCCAGGGACAAAG | |
| CDKL5 locus-PCR1 reverse | TGGAGTTCAGACGTGTGCTCTTCCGATCTCTGGTACTG | 276 |
| | GGCTCCGCAATTT | |
| CXCR4 locus-PCR1 forward | ACACTCTTTCCCTACACGACGCTCTTCCGATCTNNNNT | 277 |
| | CTTGAGGGCCTTGCGCTTC | |
| CXCR4 locus-PCR1 reverse | TGGAGTTCAGACGTGTGCTCTTCCGATCTCCTTCATCA | 278 |
| | GTCTGGACCGCTA | |
| IL2RB locus-PCR1 forward | ACACTCTTTCCCTACACGACGCTCTTCCGATCTNNNNG | 279 |
| | GACCAGGACAGGAAGGAGGAA | |
| IL2RB locus-PCR1 reverse | TGGAGTTCAGACGTGTGCTCTTCCGATCTGTGGCAGGT | 280 |
| | ACAAAGTGGGAGG | |
| HBG1/2 locus-PCR1 forward | ACACTCTTTCCCTACACGACGCTCTTCCGATCTNNNNT | 281 |
| | CTTCATCCCTAGCCAGCCGC | |
| HBG1/2 locus-PCR1 reverse | TGGAGTTCAGACGTGTGCTCTTCCGATCTAACGGCTG | 282 |
| | ACAAAAGAAGTCCTGG | |
| mouse Dnmt1 locus-PCR1 forward | ACACTCTTTCCCTACACGACGCTCTTCCGATCTNNNNC | 283 |
| | CTTCGGGCATAGCATGG | |
| mouse Damt1 locus-PCR1 reverse | TGGAGTTCAGACGTGTGCTCTTCCGATCTCCTCGGCAT | 284 |
| | CGGTCC | |
| mouse Chd2 locus-PCR1 forward | ACACTCTTTCCCTACACGACGCTCTTCCGATCTNNNNA | 285 |
| | GTCAGTGCCTCACCTCTCACAC | |
| mouse Chd2 locus-PCR1 reverse | TGGAGTTCAGACGTGTGCTCTTCCGATCTCTTGCAGAT | 286 |
| | CGAGGAGACTOGCA | |
| mouse Col12a1 locus-PCR1 forward | ACACTCTTTCCCTACACGACGCTCTTCCGATCTNNNNT | 287 |
| | GAAGTCATGTGCGGTCTGGTCA | |
| mouse Col12a1 locus-PCR1 reverse | TGGAGTTCAGACGTGTGCTCTTCCGATCTAGCTCACAG | 288 |
| | CCTCATGAAGGGA | |
| mouse Ctnnb1 locus-PCR1 forward | ACACTCTTTCCCTACACGACGCTCTTCCGATCTNNNNA | 289 |
| | CCAGCTACTTGCTCTTGCGTG | |
| mouse Ctnnbl locus-PCR1 reverse | TGGAGTTCAGACGTGTGCTCTTCCGATCTCGTAGATGG | 290 |
| | CTTCTTCAGGTAGCA | |
| HEK3 OT1 locus-PCR1 forward | ACACTCTTTCCCTACACGACGCTCTTCCGATCTNNNNT | 291 |
| | CCCCTGTTGACCTGGAGAA | |
| HEK3 OT1 locus-PCR1 reverse | TGGAGTTCAGACGTGTGCTCTTCCGATCTCACTGTACT | 292 |
| | TGCCCTGACCA | |
| HEK3 OT2 locus-PCR1 forward | ACACTCTTTCCCTACACGACGCTCTTCCGATCTNNNNT | 293 |
| | TGGTGTTGACAGGGAGCAA | |
| HEK3 OT2 locus-PCR1 reverse | TGGAGTTCAGACGTGTGCTCTTCCGATCTCTGAGATGT | 294 |
| | GGGCAGAAGGG | |
| HEK3 OT3 locus-PCR1 forward | ACACTCTTTCCCTACACGACGCTCTTCCGATCTNNNNT | 295 |
| | GAGAGGGAACAGAAGGGCT | |
| HEK3 OT3 locus-PCR1 reverse | TGGAGTTCAGACGTGTGCTCTTCCGATCTGTCCAAAG | 296 |
| | GCCCAAGAACCT | |
| HEK3 OT4 locus-PCR1 forward | ACACTCTTTCCCTACACGACGCTCTTCCGATCTNNNNT | 297 |
| | CCTAGCACTTTGGAAGGTCG | |
| HEK3 OT4 locus-PCR1 reverse | TGGAGTTCAGACGTGTGCTCTTCCGATCTGCTCATCTT | 298 |
| | AATCTGCTCAGCC | |
| FANCF OT1 locus-PCR1 forward | ACACTCTTTCCCTACACGACGCTCTTCCGATCTNNNNG | 299 |
| | CGGGCAGTGGCGTCTTAGTCG | |
| FANCF OT1 locus-PCR1 reverse | TGGAGTTCAGACGTGTGCTCTTCCGATCTCCCTGGGTT | 300 |
| | TGGTTGGCTGCTC | |
| FANCF OT2 locus-PCR1 forward | ACACTCTTTCCCTACACGACGCTCTTCCGATCTNNNNC | 301 |
| | TCCTTGCCGCCCAGCCGGTC | |
| FANCF OT2 locus-PCR1 reverse | TGGAGTTCAGACGTGTGCTCTTCCGATCTCACTGGGG | 302 |
| | AAGAGGCGAGGACAC | |
| FANCF OT3 locus-PCR1 forward | ACACTCTTTCCCTACACGACGCTCTTCCGATCTNNNNC | 303 |
| | CAGTGTTTCCCATCCCCAACAC | |
| FANCF OT3 locus-PCR1 reverse | TGGAGTTCAGACGTGTGCTCTTCCGATCTGAATGGATC | 304 |
| | CCCCCCTAGAGCTC | |
| FANCF OT4 locus-PCR1 forward | ACACTCTTTCCCTACACGACGCTCTTCCGATCTNNNNC | 305 |
| | AGGCCCACAGOTCCTTCTGGA | |
| FANCF OT4 locus-PCR1 reverse | TGGAGTTCAGACGTGTGCTCTTCCGATCTCCACACGG | 1306 |
| | AAGGCTGACCACG | |
| EMX1 OT1 locus-PCR1 forward | ACACTCTTTCCCTACACGACGCTCTTCCGATCTNNNNG | 307 |
| | TGGGGAGATTTGCATCTGTGGAGG | |
| EMX1 OT1 locus-PCR1 reverse | TGGAGTTCAGACGTGTGCTCTTCCGATCTGCTTTTATA | 308 |
| | CCATCTTGGGGTTACAG | |
| EMX1 OT2 locus-PCR1 forward | ACACTCTTTCCCTACACGACGCTCTTCCGATCTNNNNC | 309 |
| | AATGTGCTTCAACCCATCACGGC | |
| EMX1 OT2 locus-PCR1 reverse | TGGAGTTCAGACGTGTGCTCTTCCGATCTCCATGAATT | 310 |
| | TGTGATGGATGCAGTCTG | |
| EMX1 OT3 locus-PCR1 forward | ACACTCTTTCCCTACACGACGCTCTTCCGATCTNNNNG | 311 |
| | AGAAGGAGGTGCAGGAGCTAGAC | |
| EMX1 OT3 locus-PCR1 reverse | TGGAGTTCAGACGTGTGCTCTTCCGATCTCATCCCGAC | 312 |
| | CTTCATCCCTCCTGG | |
| EMX1 OT4 locus-PCR1 forward | ACACTCTTTCCCTACACGACGCTCTTCCGATCTNNNNA | 313 |
| | CAGGTGAATAACCGGTCGCCA | |
| EMXI OT4 locus-PCR1 reverse | TGGAGTTCAGACGTGTGCTCTTCCGATCTTTTATCAAA | 314 |
| | CAAGGTGCAGATACAGCAA | |
| HEK4 OT1 locus-PCR1 forward | ACACTCTTTCCCTACACGACGCTCTTCCGATCTNNNNG | 315 |
| | GCATGGCTTCTGAGACTCA | |
| HEK4 OT1 locus-PCR1 reverse | TGGAGTTCAGACGTGTGCTCTTCCGATCTGTCTCCCTT | 316 |
| | GCACTCCCTGTCTTT | |
| HEK4 OT2 locus-PCR1 forward | ACACTCTTTCCCTACACGACGCTCTTCCGATCTNNNNT | 317 |
| | TTGGCAATGGAGGCATTGG | |
| HEK4 OT2 locus-PCR1 reverse | TGGAGTTCAGACGTGTGCTCTTCCGATCTGAAGAGGC | 318 |
| | TGCCCATGAGAG | |
| HEK4 OT3 locus-PCR1 forward | ACACTCTTTCCCTACACGACGCTCTTCCGATCTNNNNG | 319 |
| | GTCTGAGGCTCGAATCCTG | |
| HEK4 OT3 locus-PCR1 reverse | TGGAGTTCAGACGTGTGCTCTTCCGATCTCTGTGGCCT | 320 |
| | CCATATCCCTG | |
| HEK4 OT4 locus-PCR1 forward | ACACTCTTTCCCTACACGACGCTCTTCCGATCTNNNNT | 321 |
| | TTCCACCAGAACTCAGCCC | |
| HEK4 OT4 locus-PCR1 reverse | TGGAGTTCAGACGTGTGCTCTTCCGATCTCCTCGGTTC | 322 |
| | CTCCACAACAC | |
| Bat-25 microsatellite-PCR1 forward | ACACTCTTTCCCTACACGACGCTCTTCCGATCTGGAGG | 323 |
| | ATGACGAGTTGGCCCTAGAC | |
| Bat-25 microsatellite-PCR1 reverse | TGGAGTTCAGACGTGTGCTCTTCCGATCTCCAAAGAG | 324 |
| | ACAGCAGTTGGAACATGA | |
| Bat-26 microsatellite-PCR1 forward | ACACTCTTTCCCTACACGACGCTCTTCCGATCTAGTGG | 325 |
| | AGTGGAGGAGGGGAGAGAAA | |
| Bat-26 microsatellite-PCR1 reverse | TGGAGTTCAGACGTGTGCTCTTCCGATCTTTGCAGTTT | 326 |
| | CATCACTGTCTGCGGT | |
| MONO-27 microsatellite-PCR1 | ACACTCTTTCCCTACACGACGCTCTTCCGATCTCTACT | 327 |
| forward | GTCCTACTGTGCCTGGCTCC | |
| MONO-27 microsatellite-PCR1 | TGGAGTTCAGACGTGTGCTCTTCCGATCTCAGCCTGGG | 328 |
| reverse | CAAGATAATGAGACCC | |
| NR-21 microsatellite-PCR1 forward | ACACTCTTTCCCTACACGACGCTCTTCCGATCTCTGGT | 329 |
| | GCACAGAGCAGAACCATCCT | |
| NR-21 microsatellite-PCR1 reverse | TGGAGTTCAGACGTGTGCTCTTCCGATCTGCAACCTCA | 330 |
| | AAAGCTGCCTCCCTTT | |
| NR-24 microsatellite-PCR1 forward | ACACTCTTTCCCTACACGACGCTCTTCCGATCTCTGTA | 331 |
| | GTCCCAGCTATTCGGGAGGC | |
| NR-24 microsatellite-PCR1 reverse | TGGAGTTCAGACGTGTGCTCTTCCGATCTAAATGACCC | 332 |
| | CTTCCTGCCCATCACT | |
| HSPH1-T17 microsatellite-PCR1 | ACACTCTTTCCCTACACGACGCTCTTCCGATCTTGGAA | 333 |
| forward | AAGGAACTGCATCTGTGACGG | |
| HSPH1-T17 microsatellite-PCR1 | TGGAGTTCAGACGTGTGCTCTTCCGATCTTTTTCCTAA | 334 |
| reverse | TCCCCTGTGAAACCTGT | |
| EWSR1 microsatellite-PCR1 | ACACTCTTTCCCTACACGACGCTCTTCCGATCTAACAA | 335 |
| forward | TGTTCATGGTTGTGATGT | |
| EWSR1 microsatellite-PCR1 reverse | TGGAGTTCAGACGTGTGCTCTTCCGATCTCTGGATCTC | 336 |
| | CCCTTGAACCTTTGGA | |
| MSI-01 microsatellite-PCR1 forward | ACACTCTTTCCCTACACGACGCTCTTCCGATCTTTGAT | 337 |
| | GTCCTGCGTCTAGGGTCTGC | |
| MSI-01 microsatellite-PCR1 reverse | TGGAGTTCAGACGTGTGCTCTTCCGATCTGACTGGAG | 338 |
| | CCTTGGACAGGTTGAGA | |
| MSI-03 microsatellite-PCR1 forward | ACACTCTTTCCCTACACGACGCTCTTCCGATCTGOCAC | 339 |
| | TGCTATTTGAAAGAGTTGCTC | |
| MSI-03 microsatellite-PCR1 reverse | TGGAGTTCAGACGTGTGCTCTTCCGATCTCACACCTGG | 340 |
| | CTAAATGCTCGGATT | |
| MSI-04 microsatellite-PCR1 forward | ACACTCTTTCCCTACACGACGCTCTTCCGATCTTCCAA | 341 |
| | GATTCCTTCCCTGGCCACTC | |
| MSI-04 microsatellite-PCR1 reverse | TGGAGTTCAGACGTGTGCTCTTCCGATCTACTGTCTGT | 342 |
| | AGTCCTGGCTTCGTGG | |
| MSI-06 microsatellite-PCR1 forward | ACACTCTTTCCCTACACGACGCTCTTCCGATCTAGCAG | 343 |
| | CAAACTGAACAGGTCACCAAC | |
| MSI-06 microsatellite-PCR1 reverse | TGGAGTTCAGACGTGTGCTCTTCCGATCTGCTACACTG | 344 |
| | TGGCATCAGCACATATC | |
| MSI-07 microsatellite-PCR1 forward | ACACTCTTTCCCTACACGACGCTCTTCCGATCTGCTGA | 345 |
| | AAGCAACCTAAGCTGTGGTGA | |
| MSI-07 microsatellite-PCR1 reverse | TGGAGTTCAGACGTGTGCTCTTCCGATCTTGCTATAAG | 346 |
| | AGCTGAGCAGACGACA | |
| MSI-08 microsatellite-PCR1 forward | ACACTCTTTCCCTACACGACGCTCTTCCGATCTCCAGC | 347 |
| | CCCCATGTACACTGTAGTOG | |
| MSI-08 microsatellite-PCR1 reverse | TGGAGTTCAGACGTGTGCTCTTCCGATCTCCCACCCCA | 348 |
| | AGGCCAAAATCAGTAA | |
| MSI-09 microsatellite-PCR1 forward | ACACTCTTTCCCTACACGACGCTCTTCCGATCTGTCTC | 349 |
| | GGCTACTTGGGAGGCTTAGG | |
| MSI-09 microsatellite-PCR1 reverse | TGGAGTTCAGACGTGTGCTCTTCCGATCTCCGACTAAA | 350 |
| | GAGGTCATTCACTTGT | |
| MSI-11 microsatellite-PCR1 forward | ACACTCTTTCCCTACACGACGCTCTTCCGATCTAGCAT | 351 |
| | GTTTGCAGCCTTCTTCTGGA | |
| MSI-11 microsatellite-PCR1 reverse | TGGAGTTCAGACGTGTGCTCTTCCGATCTAGAACTTCT | 352 |
| | CTCACAATGTAGCCCCT | |
| MSI-12 microsatellite-PCR1 forward | ACACTCTTTCCCTACACGACGCTCTTCCGATCTGCTGA | 353 |
| | GGCTAAACACTATCATGCCA | |
| MSI-12 microsatellite-PCR1 reverse | TGGAGTTCAGACGTGTGCTCTTCCGATCTCAGAGGTTG | 354 |
| | CAGTGAGCCGAGATTG | |
| MSI-13 microsatellite-PCR1 forward | ACACTCTTTCCCTACACGACGCTCTTCCGATCTACATC | 355 |
| | TTCAGGTCAGGAAAACAGCTCG | |
| MSI-13 microsatellite-PCR1 reverse | TGGAGTTCAGACGTGTGCTCTTCCGATCTTAATGACTT | 356 |
| | GGGCTTTGGAAGCAGC | |
| MSH2-RT-qPCR forward | CTTCGTGCGCTTCTTTCAGGG | 357 |
| MSH2-RT-qPCR reverse | GCAGATTCTTTGCTCCTGCCG | 358 |
| MSH6-RT-qPCR forward | CGCTGAGTGATGCCAACAAGG | 359 |
| MSH6-RT-qPCR reverse | AGCCCTCCGTTGAGGTTCTTC | 360 |
| MLHI-RT-qPCR forward | AAGACAATGGCACCGGGATCA | 361 |
| MLH1-RT-qPCR reverse | AAGCCTCACCTCGAAAGCCAT | 362 |
| PMS2-RT-qPCR forward | CTGGGCAGGTGGTACTGAGTC | 363 |
| PMS2-RT-qPCR reverse | TAGTGGCACCAGCATCCAGAC | 364 |
| ACTB-RT-PCR forward | GAGGCACTCTTCCAGCCTT | 365 |
| ACTB-RT-qPCR reverse | AAGGTAGTTTCGTGGATGCC | 366 |

[0785] The subsequent PCR step (PCR2) added unique i7 and i5 Illumina barcode combinations to both ends of the PCR1 DNA fragment to enable sample demultiplexing. Each 12.5 μL PCR2 reaction was performed with 500 nM of each barcoding primer, 0.5 μL PCR 1 product, and 6.25 μL Phusion U Green Multiplex PCR Master Mix (Thermo Fisher Scientific) with the following thermocycling conditions: 98° C. for 2 min, 9 cycles of [98° C. for 15 s, 61° C. for 20 s, and 72° C. for 30 s], followed by 72° C. for 2 min. PCR2 products were pooled by common amplicons, separated by electrophoresis on a 1% agarose gel, purified using the QIAquick Gel Extraction Kit (QIAGEN), and eluted in nuclease-free water. DNA amplicon libraries were quantified with a Qubit 3.0 Fluorometer (Thermo Fisher Scientific), then sequenced using the MiSeq Reagent Kit v2 or MiSeq Reagent Micro Kit v2 (Illumina), with 280-300 single-read cycles. A list of FASTQ sequencing files generated in this work is provided in Table 7.

### Quantification of Amplicon Sequencing Data

[0786] All arrayed prime editing experiments from FIGS. 42A-54B were analyzed as follows. Sequencing reads were demultiplexed using MiSeq Reporter (Illumina). Amplicon sequences were aligned to a reference sequence with CRISPResso2 (Clement et al., 2019) in standard mode using the parameters “−q 30” and “−discard_indel_reads TRUE”. For each amplicon, the CRISPResso2 quantification window was positioned to include the entire sequence between pegRNA- and sgRNA-directed Cas9 cut sites, as well as an additional >10-nt beyond both cut sites. For each amplicon, the same quantification window was used for PE2, PE3, PE4, and PE5 conditions, regardless of whether a nicking sgRNA is used. All prime editing efficiencies describe percentage of (number of reads with the intended edit that do not contain indels)/(number of reads that align to the amplicon). Single-base substitution prime editing frequencies were quantified as: (frequency of intended base substitution in reference-aligned, non-discarded reads)×(number of reference-aligned, non-discarded reads)/(number of reference-aligned reads). For all other prime edits (insertion, deletion, contiguous substitutions, combinations of edits). CRISPResso2 was run in HDR mode with all the same parameters described above and using the intended editing outcome as the expected allele (−e). Frequencies for these edits were quantified as: (number of HDR-aligned reads)/(number of reference-aligned reads). All indel frequencies were quantified as: (number of indel-containing reads)/(number of reference-aligned reads).

### CRISPRi Library Cloning and Lentivirus Production

[0787] An oligonucleotide library of CRISPRi sgRNAs, oBA697, was designed to contain 60 non-targeting control sgRNAs and 1.513 sgRNAs that target 477 DNA repair genes with three sgRNAs per gene (Hussmann et al., 2021). A list of targeted genes and sequences in the sgRNA library is provided in Table 5. The oBA697 oligonucleotide library was amplified by PCR using Phusion High-Fidelity DNA Polymerase (New England BioLabs) and purified with the NucleoSpin Gel and PCR Clean-up kit (Macherey-Nagel). The amplified CRISPRi library inserts and the pPC1000 lentiviral screen vector containing the pre-validated prime edit site were digested with BstXI and BlpI restriction endonucleases (Thermo Fisher Scientific), ligated with T4 ligase (New England BioLabs), then transformed into Stellar cells (Takara Bio). The pooled plasmid library was amplified in MegaX DH10B electrocompetent cells (Thermo Fisher Scientific). The pooled library sequences were further verified by sequencing on a MiSeq Reagent Kit v2 (Illumina).

[0788] To produce lentivirus with pPC1000 libraries, HEK293T cells were seeded in a 15 cm dish with DMEM supplemented with 10% FBS. One day after seeding, cells were transfected using 60 μL TransIT-LT1 reagent (Mirus Bio) with 15 μg pPC1000 plasmid library and 5 μg packaging plasmids for expression of HIV-1 gag/pol, rev, tat, and VSV-G envelope protein. 24 h after transfection, 40 μL ViralBoost reagent (ALSTEM) was added to each 15 cm dish. 48 h after transfection, viral supernatant was collected, filtered through a 0.45 μm PVDF filter (Corning), and stored at −80° C.

### Repair-Seq Screens in HeLa Cells

[0789] PE2, PE3+50, PE3-50 Repair-seq screens were performed in biological duplicate in HeLa cells with integrated dCas9-BFP-KRAB (Addgene #46911) (Gilbert et al., 2013). Lentivirus containing the CRISPRi library were produced from HEK293T cells as described above. HeLa CRISPRi cells expressing dCas9-KRAB were transduced with the lentiviral library at 0.1 MOI in DMEM supplemented with 10% FBS, 100 U mL¹ penicillin, 100 μg mL⁻¹ streptomycin (Thermo Fisher Scientific), and 8 μg mL⁻¹ polybrene (Sigma-Aldrich). 2 days after infection, HeLa CRISPRi cells were treated with 1 μg mL⁻¹ puromycin (Thermo Fisher Scientific) to select for HeLa CRISPRi cells with integrated library members. 3 days after infection, an additional 2 μg mL⁻¹ puromycin was added to cells. Throughout lentiviral transduction and selection steps, cells were analyzed for BFP fluorescence on a BD LSRII flow cytometer to ensure a MOI of 0.1 and completed selection. Following 3 days of selection, media was changed to DMEM supplemented with 10% FBS, and HeLa CRISPRi cells were transfected at 50% confluency in 150 mm culture dishes (Corning) with 30 μg SaPE2-P2A-BSD plasmid, 10 μg Sa-pegRNA plasmid for installing a +6 G⋅C to C⋅G edit at the pre-validated edit site, and 3.3 μg Sa-sgRNA plasmid for +50 or −50 complementary-strand nicking (when required), using 140 μL TransIT-HeLa reagent (Mirus Bio) according to the manufacturer's protocol. For an unedited HeLa control condition, cells were transfected with only 30 μg SaPE2-P2A-BSD plasmid as described above. 24 h following transfection, cells were treated with 10 μg mL¹ blasticidin (Thermo Fisher Scientific) to select for expression of SaPE2 protein. 72 h after transfection, HeLa CRISPRi cells were washed with PBS (Thermo Fisher Scientific), resuspended using Trypsin and DMEM, and pelleted at 1000 g for 10 min. Finally, cells were washed once more with PBS, pelleted at 1000 g for 10 min, then stored at −80° C.

### Repair-Seq Screens in K562 Cells

[0790] PE2 and PE3+50 Repair-seq screens were performed in biological duplicate in K562 cells with integrated dCas9-BFP-KRAB (Addgene #46911) (Gilbert et al., 2014). Lentivirus containing the CRISPRi library were produced from HEK293T cells as described above. K562 CRISPRi cells expressing dCas9-KRAB were transduced with the lentiviral library at 0.2 MOI in RPMI supplemented with 10% FBS, 100 U mL⁻¹ penicillin, 100 μg mL⁻¹ streptomycin, 292 μg mL⁻¹ L-Glutamine, and 8 μg mL⁻¹ polybrene (Sigma-Aldrich) by centrifugation at 1000 g for 2 h at room temperature. 2 days post infection, K562 CRISPRi cells were treated with 3 μg mL⁻¹ puromycin (Thermo Fisher Scientific) to select for cells with integrated library members. After infection, the density of the K562 CRISPRi cells was maintained at approximately 5×10⁵ mL⁻¹ and the culture was replaced by fresh RPMI supplemented with 10% FBS. 100 U mL⁻¹ penicillin, 100 μg mL⁻¹ streptomycin, 292 μg mL⁻¹ L-Glutamine, and 3 μg mL⁻¹ puromycin 3 days and 5 days post infection. During media replacement, the cells were pelleted, washed with DPBS and resuspended in fresh media to remove dead cells. All centrifugations were performed at 150 g for 5 min in 50 mL canonical tubes to avoid cell loss. 6 days post infection, the culture was replaced twice by fresh RPMI supplemented with 10% FBS and 292 μg mL⁻¹ L-Glutamine (Thermo Fisher Scientific) to remove dead cells and antibiotics. Throughout lentiviral transduction and selection steps, cells were analyzed for BFP fluorescence on an Attune N×T flow cytometer to ensure an MOI of 0.2 and completed selection. 7 days post infection, the cells were nucleofected using the SE Cell Line 4D-Nucleofector X kit L (Lonza) with 1×10⁷ cells (program FF-120), 7.5 μg SaPE2 plasmid, 2.5 μg Sa-pegRNA plasmid for installing a +6 G⋅C to C⋅G edit at the pre-validated edit site, and 3.3 μg Sa-sgRNA plasmid for +50 complementary-strand nicking (for PE3+50 conditions). For an unedited K562 control condition, cells were mock electroporated without any DNA plasmid as described above. After nucleofection, the cells were seeded at a density of 5×10⁵ mL⁻¹ in RPMI supplemented with 10% FBS and 292 μg mL⁻¹ L-Glutamine. 48 h post nucleofection, the culture were pipetted up and down 5 times to prevent cells from clumping. 84 h post nucleofection, the cells were pelleted at 1000 g for 10 min, washed with DPBS, pelleted at 1000 g for 10 min, and then stored at −80° C.

### High-Throughput Sequencing of Repair-Seq Libraries

[0791] Genomic DNA from edited HeLa CRISPRi and K562 CRISPRi cells was extracted using NucleoSpin Blood XL Maxi kit (Machery-Nagel). The number of live cells from which genomic DNA was extracted for each Repair-seq condition is listed in Table 9.

TABLE 9
High-throughput Sequencing of Repair-seq Libraries

| PE repair- | Number of live cells | Number of |
|---|---|---|
| seq screen | harvested for genomic | sequencing |
| condition | DNA extraction (× 10e6) | reads |
| K562 PE2 rep1 | 83.72 | 118658517 |
| K562 PE2 rep2 | 118.69 | 188344211 |
| K562 PE3 + 50 rep1 | 70.213 | 230946050 |
| K562 PE3 + 50 rep2 | 90.965 | 206570163 |
| HeLa PE2 rep1 | 107.85 | 420685828 |
| HeLa PE2 rep2 | 73.5 | 171390008 |
| HeLa PE3 + 50 rep1 | 105.6 | 229364033 |
| HeLa PE3 + 50 rep2 | 95.4 | 290852565 |
| HeLa PE3-50 rep1 | 93.15 | 234577915 |
| HeLa PE3-50 rep2 | 96.9 | 150012222 |

[0792] The genomic DNA was used as template for the initial round of PCR (PCR1) to amplify the region of interest. For each sample, a 100 μL PCR1 reaction was performed with 1 μL of 100 μM of each primer for amplifying pPC1000 sgRNA and edit site (Table 8), 10 μg of genomic DNA as template, 50 μL of NEBNext Ultra II Q5 Master Mix (New England BioLabs), and molecular biology grade water (Corning) on a BioRad C1000 thermal cycler with the following thermocycler conditions: 98° C. for 30 s, 22 cycles of [98° C. for 10 s, 65° C. for 75 s], followed by 65° C. for 5 min. These amplification reactions were verified by TBE gel electrophoresis and ethidium bromide staining. The amplified products were purified using SPRIselect (Beckman Coulter) prior to the following round of PCR amplification (PCR2). Purified PCR 1 amplicons were quantified using a high sensitivity DNA chip (Agilent Technologies) on an Agilent 2100 Bioanalyzer. PCR2 enabled indexing of the samples by the addition of i7 and i5 Illumina barcodes. For each 50 μL indexing PCR2 reaction: 10 ng of PCR1 amplicon was used as template along with 25 μL of KAPA HiFi HotStart ReadyMix (Roche Molecular Systems), 3 μL of 10 μM of each barcoding primer with the following thermocycler conditions: 95° C. for 3 min, 8 cycles of [98° C. for 20 s, 65° C. for 15 s, 72° C. for 15 s], followed by 72° C. for 1 min. The reactions were verified by TBE gel electrophoresis and ethidium bromide staining. PCR2 products from four PCR2 products were purified using SPRIselect and quantified on an Agilent 2100 Bioanalyzer prior to pooling. Repair-seq libraries were sequenced with the NovaSeq 6000 S1 Reagent Kit v1.5 (Illumina) with two 8-nt index reads, 44 cycles for R 1 read, 263 cycles for R2 read. The number of sequencing reads acquired for each screen condition and replicate are listed in Table 9.

### Processing of Repair-Seq Screen Data

[0793] Repair-seq screen data was processed using a modified version of the analysis approach described in (Hussmann et al., 2021), with modifications made to accommodate the different library preparation strategy used in this Example (direction amplification of genomic DNA without ligation of UMIs before amplification) and the qualitatively different categories of repair outcomes empirically observed in prime editing data.

[0794] Briefly, sequencing data for a batch of screens consists of 4 reads per spot: 2 8-nt index reads, a 44-nt R1 read of the CRISPRi sgRNA, and a 263-nt R2 read of the repair outcome. Reads from a batch of screens are demultiplexed into individual screens based on index reads. Within each screen, reads are demultiplexed into sets representing outcomes from cells receiving each individual CRISPRi sgRNA by comparing R1 sequences to a table of expected CRISPRi sgRNAs, allowing up to one mismatch between observed and expected sequences. Because direct amplification without UMIs does not allow consensus error correction of multiple reads of each repair outcome, analysis must account for presence of errors in outcome sequences introduced by PCR or by sequencing to avoid interpreting such errors as genuine editing outcomes. As an initial triage, reads with less than 60% of base calls with a quality score greater than or equal to 30 were discarded.

[0795] To categorize a repair outcome sequencing read that passed this quality filter, the outcome was first locally aligned to the screen vector, the pegRNA sequence, the human genome (hg19) and the Bos taurus genome (bosTau7) to identify a comprehensive set of alignments between portions of the outcome sequence and any of these reference sequences. The set of local alignments identified was then pruned to a parsimonious set of alignments that explains as much of the read as possible using the minimum number of alignments using a greedy approach. The parsimonious alignments are then parsed through a decision tree that examines their configuration to assign the outcome to a category.

[0796] Outcomes were classified as unedited if they consisted of a single alignment to the screen vector that did not contain the programmed SNV or any indels, with the exception of deletions of 1-nt that did not fall within 5-nt of a programmed nick, which were considered possible sequencing or PCR errors and were disregarded. Outcomes were classified as deletions if they consisted of two alignments to the screen vector that collectively covered the entire read but omitted a segment of the screen vector. Outcomes were classified as tandem duplications if they consisted of two or more alignments to the screen vector that collectively covered the entire read such that the portions of the screen vector covered by any two consecutive alignments on the read overlapped. Outcomes were classified as joining of pegRNA sequence at an unintended location if the set of parsimonious alignments included an alignment to the pegRNA such that the primer binding site (PBS) of the pegRNA was aligned to the same part of the read as the PBS in a screen vector alignment but the reverse transcription template (RTT) of the pegRNA was not aligned to the same part of the read as the RTT in a screen vector alignment. Note that in some such cases, the sequence produced is also consistent in theory with a multi-stage editing event consisting of an initial deletion or duplication that does not disrupt the PAM or protospacer followed by pegRNA-dependent editing of the resulting modified target sequence. Outcomes were classified as installation of additional edits from nearly matched scaffold sequence if the set of parsimonious alignments included an alignment to the pegRNA such that both the PBS and RTT were aligned to the same parts of the read as the PBS and RTT in a single alignment to the screen vector that covered the whole read and that the pegRNA alignment contained fewer edits relative to the outcome than the screen vector alignment.

### Quantification of CRISPRi-Induced Changes in Outcome Frequencies

[0797] Following categorization of all outcomes for all CRISPRi sgRNAs, counts of each category for each sgRNA are collected into a matrix for downstream analysis, and the total frequency of each category across all outcomes from cells receiving non-targeting sgRNAs is calculated to establish unperturbed baseline frequencies. Because not all CRISPRi sgRNAs achieve high levels of knockdown, calculation of gene-level effects of CRISPRi sgRNAs on outcome categories must strike a balance between assigning increased confidence to phenotypes that are supported by multiple sgRNAs per gene without penalizing genes if not all sgRNAs targeting the gene have high activity. To do this, gene-level changes in outcome category frequencies in a given screen replicate (used in FIGS. 40E-40G, FIGS. 41E-41H, FIGS. 47A-47I) are calculated by first computing the log 2 fold change in frequency of the category for every targeting sgRNA relative to the combined frequency across all non-targeting sgRNAs. For each gene, the gene-level log 2 fold change is then taken to be the mean of these values for the two sgRNAs targeting the gene with the most extreme absolute values. To provide a qualitative estimate of the range of values produced in the absence of genuine signal by this process of selecting extreme values, the sixty non-targeting sgRNAs were randomly partitioned into 20 sets of 3 quasi-genes and the same process was applied to these quasi-genes.

### Quantification of Deletion Boundaries

[0798] To maximize signal to noise in calculation of position-specific profiles of deletion frequencies and in relative fraction of deletions that removed sequence far outside of programmed nicks, outcomes from all sgRNAs targeting each gene were grouped together. In each such group of outcomes, an array of counts for every position in the screen vector was initialized to 0. For each read classified as a deletion, an interval from the first position deleted to the last position deleted was incremented by 1 in the array of counts. The final array of counts was then divided by the total number of outcomes. Deletions flanked by microhomology result in sequence outcomes that are consistent with two or more degenerate pairs of deletion boundaries. For these deletions, the pair with the minimum values in the coordinate system of the screen vector was arbitrarily chosen. To prevent primer dimers or other non-specific amplification products from being incorrectly identified as long deletions, apparent deletions for which the deleted region overlapped a window of 10-nt around either amplicon primer were excluded from calculation of deletion boundary statistics.

### Design of Recoded Sa-pegRNA Scaffold

[0799] In Repair-seq screens performed, an unintended editing outcome was observed in which additional edits are installed from nearly-matched scaffold sequence. This outcome contains a +17 T⋅A-to-C⋅G and +19 C⋅G insertion, in addition to the intended +6 G⋅C-to-C⋅G transversion. These unintended edits are consistent with incorporation of an extended 3′ DNA flap generated from reverse transcription of the Sa-pegRNA scaffold sequence into the genome. Because this extended 3′ flap shares 5-nt of homology (5′-GCCAA-3′) with the genomic target sequence after the last edited nucleotide, it was hypothesized that disrupting this homology could reduce the frequency of incorporating these unintended edits from reverse transcription of the Sa-pegRNA scaffold. A recoded Sa-pegRNA was therefore designed that alters two base pairs within the Sa-pegRNA scaffold while preserving the same base pairing interactions. The extended 3′ flap templated by this recoded Sa-pegRNA has reduced homology with the genomic target sequence. The spacer, PBS, and RT template sequences of the recoded Sa-pegRNA are identical to those for the Sa-pegRNA used in Repair-seq screens. It was observed that prime editing with this recoded Sa-pegRNA mediates similar frequencies of intended editing but substantially reduced unintended scaffold sequence incorporation compared to the original Sa-pegRNA used in Repair-seq screens.

HEK293T siRNA Transfection

[0800] For experiments in FIG. 42C, HEK293T cells were seeded on 6-well plates (Corning) at 7.5×10⁵ cells per well in DMEM plus GlutaMAX supplemented with 10% FBS. At 60% confluency 16 h after seeding, cells were transfected with 9 μL Lipofectamine RNAiMAX (Thermo Fisher Scientific) according to the manufacturer's protocol and 90 pmol ON-TARGETplus SMARTpool siRNAs (Horizon Discovery). One day after transfection, media was replaced with fresh DMEM plus GlutaMAX supplemented with 10% FBS. 2 days after transfection, cells were washed once with PBS and resuspended using TrypLE (Thermo Fisher Scientific) and DMEM plus GlutaMAX supplemented with 10% FBS. HEK293T cells were then seeded on 96-well plates (Corning) at 2.5×10⁴ cells per well. Between 16 and 24 h after seeding, cells were transfected at 60-80% confluency with 0.5 μL Lipofectamine 2000 (Thermo Fisher Scientific) according to the manufacturer's protocol and 200 ng prime editor plasmid, 66 ng pegRNA plasmid, 22 ng sgRNA plasmid (when required), and 5 pmol of the same ON-TARGETplus SMARTpool siRNAs used in the first transfection. For control conditions, cells were treated with non-targeting siRNAs in both transfections. For experiments in FIG. 49F, only the second transfection with PE components and siRNA was performed. Cells were cultured for 72 h after the second transfection before genomic DNA extraction. Real time quantitative PCR

[0801] To measure RNAi knockdown (FIG. 49E), RNA was isolated from HEK293T cells 72 h after the second siRNA transfection and converted to cDNA using the SYBR Green Fast Advanced Cells-to-CT Kit (Thermo Fisher Scientific) with cell lysis for 10-15 min using lysis solution containing 1:50 DNasel to fully digest genomic DNA. All other steps were carried out according to the manufacturer's protocol. Each 20 μL qPCR reaction was performed in technical and biological triplicate with 500 nM of each primer, 2 μL cDNA, 1×SYBR Green (Thermo Fisher Scientific), and 10 μL Q5 High-Fidelity 2× Master Mix (New England BioLabs) on a CFX96 Touch Real-Time PCR Detection System (Bio-Rad Laboratories) with the following thermocycling conditions: 98° C. for 2 min, and 40 cycles of [98° C. for 15 s, 65° C. for 20 s, and 72° C. for 30 s]. β-actin (ACTB) served as a housekeeping gene to normalize the amount of cDNA in each qPCR reaction. Relative RNA abundances from gene knockdown were calculated in comparison to a non-targeting siRNA control by the 2^{-ΔΔCT}, method. A list of primers used for qPCR reactions is provided in Table 8.

### Plasmid Transfection Dose Titration in HEK293T Cells

[0802] For experiments in FIG. 50B, HEK293T cells were seeded on 96-well plates (Corning) at 1.6-1.8×10⁴ cells per well in DMEM plus GlutaMAX supplemented with 10% FBS. Between 16 and 24 h after seeding, cells were transfected at 60-80% confluency with 0.5 μL Lipofectamine 2000 (Thermo Fisher Scientific) according to the manufacturer's protocol and 66 ng pegRNA plasmid, 0-200 ng PE2 plasmid, and 0-100 ng for MLH1dn or RFP plasmid, pUC19 filler plasmid was combined with PE2, MLH1dn, and RFP plasmids in different amounts to maintain a constant amount of total plasmid transfected (366 ng). In titrations varying the amount of total editor and in trans protein together, PE2 plasmid was used at a mass ratio of 2:1 with MLH1dn and RFP. Genomic DNA was isolated from cells 72 h after transfection.

### Generation of MLH1 Knock-Out HeLa Cell Clones

[0803] One clonal wild-type HeLa cell line and two clonal ΔMLH1 HeLa lines were used to compare prime editing enhancement from MLH1dn expression versus MLH1 knockout (FIG. 50F). To generate clonal lines, HeLa cells were seeded on 6-well plates (Corning) at 2.5×10⁵ cells per well in DMEM plus GlutaMAX supplemented with 10% FBS. At 60% confluency 18 h after seeding, cells were transfected using 7.5 μL TransIT-HeLa reagent (Mirus Bio) according to the manufacturer's protocol with 2 μg pLX_331-Cas9 (SpCas9 with blasticidin marker, Addgene #96924) and 500 ng sgRNA plasmid (spacer, 5′-GACAGTGGTGAACCGCATCG-3′ (SEQ ID NO: 367)). To make clonal wild-type HeLa cells as a control, 500 ng pUC19 plasmid was transfected instead of sgRNA plasmid. 24 h following transfection, 10 ng μL⁻¹ blasticidin (Thermo Fisher Scientific) was added to each well to select for cells transfected with Cas9.

[0804] Three days following transfection, cells were plated on 96-well plates at 1 cell per well with conditioned DMEM plus GlutaMAX supplemented with 10% FBS. Single clones were grown and expanded for 18 days. To verify that ΔMLH1 cells contain biallelic MLH1 frameshift mutations and that control cells contain the wild-type genotype, the MLH1 locus from clonal genomic DNA was sequenced on a MiSeq (Illumina) as described above. FASTQ sequencing files of MLH1 in HeLa clones are listed in Table 3. HeLa ΔMLH1 clone 1 contains MLH1 c.55_56insA and c.41_58delinsTAACTTCC alleles. HeLa ΔMLH1 clone 2 contains MLH1 c.55_56insA and c.20_66del alleles. All prime editing experiments with these clonal HeLa lines were performed as described above for HeLa cells.

### Prime Editing of Contiguous Substitutions and Additional Silent Mutations

[0805] Seven sets of prime edits that substitute 1-5 contiguous bases (35 edits total) were tested across five loci in HEK293T cells. Within each set of contiguous substitutions, all five edits altered at least one base within the seed region of the pegRNA protospacer (+1-3 nucleotides), at least one base within the PAM sequence of the pegRNA protospacer (+5 G or +6 G), or no bases within the seed region or PAM sequence at all. Because prime edits that alter the seed region or PAM sequence are more efficiently made, the design of these contiguous substitution edits controls for these confounding effects on editing efficiency, thereby enabling comparison of editing efficiency within each set.

[0806] Six sets of prime edits that program a coding change with or without additional silent mutations (27 edits total) were tested across six gene targets in HEK293T cells. Each of the six coding edits makes a transversion at one of the PAM nucleotides of the pegRNA protospacer (+5 G or +6 G). This design controls for confounding effects on editing efficiency (as explained above), allowing comparison of editing efficiency within each set. Silent mutations were designed to be close to (typically within 5-bp from) the intended coding edit to maximize interference of MMR recognition of the intended coding edit. The frequency of reads that contain the intended coding edit without indels and with or without any additional silent mutations was quantified using CRISPResso2 as described above.

### Analysis of Prime Editor Activity at Cas9 Off-Target Sites

[0807] Prime editor activity at known Cas9 off-target sites was determined by sequencing genomic DNA from HEK293T cells 3 days after transfection with plasmids encoding PE2, pegRNAs, and MLH1dn (when required) as described above. The top 4 off-target sites for each of the HEK3, EMX1, FANCF, and HEK4 spacers previously detected by CIRCLE-seq (Tsai et al., 2017) (16 sites total) were deep sequenced from genomic DNA samples as described above. To analyze off-target editing, reads were aligned to reference off-target amplicons using CRiSPResso2 (Clement et al., 2019) in standard mode with the parameters “−q 30” and “−w 10.” Off-target reads were called as leniently as possible to capture all potential reverse transcription products. For each off-target reference amplicon, the nucleotide sequence 3′ of the Cas9 nick site (prime-editable target) was compared to the 3′ DNA flap sequence encoded by pegRNA reverse transcription. Counting from the 5′ ends, the minimum sequence of the 3′ DNA flap that deviates from prime-editable target sequence was designated as an off-target marker sequence. All reference-aligned reads that contain this off-target marker sequence directly 3′ of the Cas9 nick site (including indel-containing reads) were called as off-target reads. Off-target editing efficiencies were thus quantified as a percentage of (number of off-target reads)/(number of reference-aligned reads). For some amplicons, mismatch rates at the relevant editing position were comparable to rates at other positions in the amplicon, suggesting that context-specific sequencing errors may contribute to apparent off-target prime editing and therefore this conservative approach may overestimate the true rate of pegRNA-mediated editing at off-target sites.

### Sequencing of Microsatellite Instability in Genomic DNA

[0808] Microsatellite instability was assessed in genomic DNA from HCT116 cells, monoclonal wild-type HAP1 cells, monoclonal HAP1 cells grown for 2 months (˜60 cell division) following MSH2 knockout, HeLa cells 3 days after transfection with plasmids encoding PE2-P2A-BSD, pegRNA, and MLH1dn when required. HeLa cell transfections were performed as described above. 17 mononucleotide repeats that are highly sensitive to MMR activity and are widely used to diagnosis MMR deficiency in tumors (Bacher et al., 2004; Hempelmann et al., 2015; Umar et al., 2004) were deep sequenced from genomic DNA samples. The first PCR reaction (PCR1) amplified the microsatellite sequence of interest using primers (Integrated DNA Technologies) containing Illumina forward and reverse adapters. Each 20 μL PCR1 reaction was performed with 250 nM of each primer, 0.8 μL genomic DNA, 1×SYBR Green (Thermo Fisher Scientific), and 10 μL Q5 High-Fidelity 2× Master Mix (New England BioLabs) on a CFX96 Touch Real-Time PCR Detection System (Bio-Rad Laboratories) with the following thermocycling conditions: 98° C. for 3 min, 30 cycles of [98° C. for 15 s, 62° C. for 30 s, and 72° C. for 30 s], followed by 72° C. for 3 min. All 17 PCR 1 products amplified from the same genomic DNA sample were pooled, purified with 0.8×AMPure XP beads (Beckman Coulter), and eluted in nuclease-free water. A list of primers used for PCR 1 reactions is provided in Table 8. The subsequent PCR step (PCR2) added unique i7 and i5 Illumina barcode combinations to both ends of the PCR1 DNA amplicons to enable sample demultiplexing. Each 20 μL PCR2 reaction was performed with 500 nM of each barcoding primer, 25 ng of pooled PCR1 product, 1×SYBR Green, and 10 μL Q5 High-Fidelity 2× Master Mix on a CFX96 Touch Real-time PCR Detection System with the following thermocycling conditions: 98° C. for 2 min, 8 cycles of [98° C. for 15 s, 61° C. for 20 s, and 72° C. for 30 s], followed by 72° C. for 2 min. All PCR2 products were pooled, purified with 0.8×AMPure XP beads, and eluted in nuclease-free water. DNA amplicon libraries were quantified with a Qubit 3.0 Fluorometer (Thermo Fisher Scientific), then sequenced using the MiSeq Reagent Kit v2 (Illumina) with 300 single-read cycles. A list of FASTQ sequencing files generated in these experiments is provided in Table 7.

### Quantification of Microsatellite Instability

[0809] The seventeen microsatellites analyzed all consist of long homopolymers. To quantify the observed lengths of these microsatellites in a way that is robust against the high rate of sequencing errors observed in homopolymers, each sequencing read was searched for the sequences expected to flank the homopolymers and then considered the final length of the homopolymer to be the distance between these flanking sequences. Specifically, for each locus, the longest homopolymer within the amplicon was identified, and 20-nt of the expected reference sequence on either side was recorded. Sequencing reads were demultiplexed into their loci of origin based on the first 20-nt of each read. Within reads for each locus, for each sequencing read, the first occurrences of sequences within Hamming distance 2 of the two flanking sequences were recorded. If both flanking sequences were located in the expected relative orientation within 50-nt of each, the distance between was recorded.

In Vitro Transcription of Prime Editor and MLH1dn mRNA Used in iPSC and T Cell Experiments

[0810] As described previously (Nelson et al., 2021), plasmids were cloned to encode an inactivated T7 promoter followed by a 5′ untranslated region (UTR), Kozak sequence, coding sequences of PE2 or MLH1dn, and a 3′ UTR. T7 promoter inactivation prevents potential transcription from circular plasmid template during mRNA generation. These components together were PCR amplified with Phusion U Green Multiplex Master Mix (Thermo Fisher Scientific) using primers that correct T7 promoter inactivation and append a 119-nt poly(A) tail to the 3′ UTR. The resulting PCR product was purified with the QIAquick PCR Purification Kit (Thermo Fisher Scientific) and served as a template for subsequent in vitro transcription. PE2 and MLH1dn mRNAs were transcribed from these templates using the HiScribe T7 High-Yield RNA Synthesis Kit (New England BioLabs) with co-transcriptional capping by CleanCap AG (TriLink Biotechnologies) and full replacement of UTP with N¹-Methylpseudouridine-5′-triphosphate (TriLink Biotechnologies). Transcribed mRNAs were precipitated in 2.5 M lithium chloride (Thermo Fisher Scientific), washed twice in 70% ethanol, then dissolved in nuclease-free water. The resulting PE2 and MLH1dn mRNA was quantified with a NanoDrop One UV-Vis spectrophotometer (Thermo Fisher Scientific) and was stored at −80° C.

### Electroporation of Human Patient-Derived Induced Pluripotent Stem Cells

[0811] Prior to electroporation, 24-well culture plates (Thermo Fisher Scientific) were coated with 250 μL rhLaminin-521 (Thermo Fisher Scientific) diluted 1:40 in DPBS (Thermo Fisher Scientific) per well, and incubated at 37° C. in a 5% CO₂ incubator for 2 h. For electroporation, iPS cell colonies at 70-80% confluency were washed once with DPBS and dissociated in pre-warmed Accutase (Innovative Cell Technologies) for 10 min at 37° C. in a 5% CO₂ incubator. Next, iPS cells were gently triturated, moved into a sterile 15 mL conical tube, then combined with an equal volume of DMEM/F12 (Thermo Fisher Scientific) to quench dissociation enzyme activity. Cells were pelleted at 300 g for 3 min and resuspended in StemFlex medium (Thermo Fisher Scientific) supplemented with 10 μM Y-27632 (Cayman Chemical). Cell counts and viability were determined using the Countess II FL Automated Cell Counter (Thermo Fisher Scientific). For electroporation using the NEON Transfection System 10 μL kit (Thermo Fisher Scientific), 2×10⁵ iPS cells were pelleted at 300 g for 3 min and resuspended in 9 μL NEON Buffer R. The cell solution was combined with a 3 μL mixture of 1 μg PE2 mRNA, 90 pmol synthetic pegRNA (Integrated DNA Technologies), 60 pmol synthetic sgRNA (Synthego) when required, and 0-2 μg MLH1dn mRNA in NEON Buffer R. Synthetic pegRNAs and sgRNAs were dissolved in TE buffer (10 mM Tris-HCl, pH 8.0; 0.1 mM EDTA). Mock control electroporations were performed with 3 μL NEON Buffer R without any RNA added. Directly prior to electroporation, rhLaminin-521 was aspirated and immediately replaced with 250 μL pre-warmed StemFlex medium supplemented with 10 μM Y-27632 per 24-well. Next, 10 μL of the combined cell and RNA mixture was electroporated using the NEON Transfection System (Thermo Fisher Scientific) with the following parameters: 1400 V, 20 ms, one pulse. Cells were seeded immediately into rhLaminin-521-coated 24-well plates with 250 μL StemFlex medium supplemented with 10 μM Y-27632 per well. Media was changed the following day with 500 μL StemFlex medium supplemented with 5 μM Y-27632, 72 h following electroporation, media was changed to 500 μL StemFlex medium per well. Genomic DNA was extracted 96 h after electroporation by washing iPS cells once with DPBS, lysing with gDNA lysis buffer (10 mM Tris-HCl, pH 8.0; 0.05% SDS; 800 units μL⁻¹ proteinase K (New England BioLabs)) at 37° C. for 2 h, followed by enzyme inactivation at 80° C. for 30 min. All iPSC electroporations were performed in technical duplicate and biological triplicate. Following amplicon sequencing of the edited CDKL5 locus, frequencies of intended editing and indels were quantified with CRISPResso2 in HDR mode, as described above. Because patient-derived iPSCs were heterozygous for the c.1412delA allele, frequency of editable alleles with the intended edit was quantified as: (editing frequency−editing frequency in mock controls)/(100−editing frequency in mock controls). Frequency of editable alleles with indels was quantified as described above: (total number of indel-containing reads)/(number of amplicon-aligned reads). The resulting frequencies of editable alleles with the intended edit or indels were averaged between technical duplicates, and values from biological triplicates are shown.

### Electroporation of Primary Human T Cells

[0812] Prior to electroporation, T cells were activated for 2 days with Dynabeads Human T-Expander CD3/CD28 (Thermo Fisher Scientific) and cultured at 37° C. and 5% CO₂ in T cell media (X-VIVO 15 Serum-free Hematopoietic Cell Medium (Lonza), supplemented with 5% AB human serum (Valley Biomedical), 1× GlutaMAX (Thermo Fisher Scientific), 12 mM N-acetyl-cysteine (Sigma Aldrich), 50 U mL⁻¹ penicillin and 50 μg mL⁻¹ streptomycin (Thermo Fisher Scientific), 300 IU mL⁻¹ IL-2 (Peprotech), and 5 ng mL⁻¹ recombinant human IL-7 (Peprotech) and IL-15 (Peprotech)). CD3/CD28 beads were removed from cells 5-7 h before electroporation. For electroporation using the NEON Transfection System 10 μL kit (Thermo Fisher Scientific), 3.0-3.5×10⁵ cells per sample were pelleted by centrifugation for 5 min at 300 g and resuspended in 11 μL NEON Buffer T. The cell solution was added to a mix of 1 μg PE2 mRNA, 90 pmol synthetic pegRNA (Integrated DNA Technologies), 60 pmol synthetic sgRNA (Synthego), and 0-2 μg MLH1dn mRNA. Synthetic pegRNAs and sgRNAs were dissolved in TE buffer (10 mM Tris-HCl, pH 8.0; 0.1 mM EDTA). Mock control electroporations were performed with 3 μL NEON Buffer T without any RNA added. Electroporation on the NEON Transfection System (Thermo Fisher Scientific) was carried out using 10 μL NEON tips with the following parameters: 1,400 V, 10 ms, three pulses. Cells were plated in 600 μL fresh T cell media in a 24-well plate. 2 days after electroporation, cell counts and viability were determined using the Countess II Automated Cell Counter (Thermo Fisher Scientific) and 1 mL fresh T cell media was added to cells. 4 days after electroporation, cells were pelleted by centrifugation for 5 min at 300 g and genomic DNA was isolated using the PureLink Genomic DNA Mini Kit (Thermo Fisher Scientific) following the “mammalian cells lysate” protocol with elution in nuclease-free water.

### Quantification and Statistical Analysis

[0813] The number of independent biological replicates and technical replicates for each experiment are described in the Brief Description of the Drawings or the Methods details section. In FIG. 44G, a non-parametric Mann-Whitney U test was used to compare prime editing data in HEK293T cells with prime editing data in HeLa, K562, and U2OS cells. This Example refers to Tables 5-7, which are provided below:

Lengthy table referenced here
US20250327045A1-20251023-T00001
Please refer to the end of the specification for access instructions.

Lengthy table referenced here
US20250327045A1-20251023-T00002
Please refer to the end of the specification for access instructions.

Lengthy table referenced here
US20250327045A1-20251023-T00003
Please refer to the end of the specification for access instructions.

### Example 2: Development of PEmax

[0814] To further improve prime editing, the PE2 protein was optimized by varying reverse transcriptase (RT) codon usages, the length and composition of the peptide linkers between nCas9 and the reverse transcriptase, the location, composition, and number of NLS sequences, and mutations within the SpCas9 domain (FIGS. 55A and 55B). Among 20 such variants tested, the greatest enhancement in editing efficiency was observed with a prime editor architecture that uses a Genscript human codon-optimized RT, a 34-aa linker containing a bipartite SV40 NLS (Wu et al., 2009), an additional C-terminal c-Myc NLS (Dang and Lee, 1988), and R221K and N394K mutations in SpCas9 previously shown to improve Cas9 nuclease activity (Spencer and Zhang, 2017) (FIGS. 54A and 55A). This optimized prime editor architecture was designated as PEmax. Across seven substitution edits targeting different loci, using the PEmax architecture with the PE2 system (PE2max) increased the average frequency of intended editing by 2.3-fold in HeLa cells and 1.2-fold in HEK293T cells over the original PE2 architecture (FIG. 55B). Similarly, PE3 using the PEmax architecture (PE3max) increased average editing efficiencies over PE3 by 3.2-fold in HeLa cells and 1.2-fold in HEK293T cells, without substantially changing product purity (FIGS. 54A and 55A).

### REFERENCES

[0815] Acharya, S., Wilson, T., Gradia, S., Kane, M. F., Guerrette, S., Marsischky, G. T., Kolodner, R., and Fishel, R. (1996), hMSH2 forms specific mispair-binding complexes with hMSH3 and hMSH6. Proceedings of the National Academy of Sciences 93, 13629-13634.
[0816] Amato, A., Cappabianca, M. P., Perri, M., Zaghis, I., Grisanti, P., Ponzini, D., and Di Biagio, P. (2014). Interpreting elevated fetal hemoglobin in pathology and health at the basic laboratory level: new and known γ-gene mutations associated with hereditary persistence of fetal hemoglobin. International Journal of Laboratory Hematology 36, 13-19.
[0817] Anzalone, A. V., Koblan, L. W., and Liu, D. R. (2020). Genome editing with CRISPR-Cas nucleases, base editors, transposases and prime editors. Nature Biotechnology 38, 824-844.
[0818] Anzalone, A. V., Randolph. P. B., Davis, J. R., Sousa, A. A., Koblan, L. W., Levy, J. M., Chen, P. J., Wilson, C., Newby, G. A., Raguram, A., et al. (2019). Search-and-replace genome editing without double-strand breaks or donor DNA. Nature.
[0819] Asante, E. A., Smidak, M., Grimshaw, A., Houghton, R., Tomlinson, A., Jeelani, A., Jakubcova, T., Hamdan, S., Richard-Londt, A., Linehan, J. M., et al. (2015). A naturally occurring variant of the human prion protein completely prevents prion disease. Nature 522, 478-481.
[0820] Bacher, J. W., Flanagan. L. A., Smalley, R. L., Nassif, N. A., Burgart, L. J., Halberg, R. B., Megid, W. M. A., and Thibodeau, S. N. (2004). Development of a fluorescent multiplex assay for detection of MSI-High tumors. Disease Markers 20, 237-250.
[0821] Bartlett, D. W., and Davis, M. E. (2006). Insights into the kinetics of siRNA-mediated gene silencing from live-cell and live-animal bioluminescent imaging. Nucleic Acids Research 34, 322-333.
[0822] Bosch, J. A., Birchak, G., and Perrimon, N. (2021). Precise genome engineering in Drosophila using prime editing. Proceedings of the National Academy of Sciences 118, e2021996118.
[0823] Bothmer, A., Phadke, T., Barrera, L. A., Margulies, C. M., Lee, C. S., Buquicchio, F., Moss, S., Abdulkerim, H. S., Selleck, W., Jayaram, H., et al. (2017). Characterization of the interplay between DNA repair and CRISPR/Cas9-induced DNA lesions at an endogenous locus. Nature Communications 8, 13905.
[0824] Cavaleiro, A. M., Kim, S. H., Seppals, S., Nielsen, M. T., and Norholm, M. H. H. (2015). Accurate DNA Assembly and Genome Engineering with Optimized Uracil Excision Cloning. ACS Synthetic Biology 4, 1042-1046.
[0825] Chen, P.-F., Chen, T., Forman, T. E., Swanson, A. C., O'Kelly, B., Dwyer, S. A., Buttermore, E. D., Kleiman, R., Js Carrington, S., Lavery, D. J., et al. (2021). Generation and characterization of human induced pluripotent stem cells (iPSCs) from three male and three female patients with CDKL5 Deficiency Disorder (CDD). Stem Cell Research 53, 102276.
[0826] Clement, K., Rees. H., Canver, M. C., Gehrke, J. M., Farouni, R., Hsu, J. Y., Cole, M. A., Liu, D. R., Joung, J. K., Bauer, D. E., et al. (2019). CRISPResso2 provides accurate and rapid genome editing sequence analysis. Nature Biotechnology 37, 224-226.
[0827] Dang, C. V., and Lee, W. M. (1988). Identification of the human c-myc protein nuclear translocation signal. Molecular and Cellular Biology 8, 4048-4054.
[0828] Engler, C., Kandzia, R., and Marillonnet, S. (2008). A One Pot, One Step, Precision Cloning Method with High Throughput Capability. PLoS ONE 3, e3647.
[0829] Fang, W. H., and Modrich, P. (1993). Human strand-specific mismatch repair occurs by a bidirectional mechanism similar to that of the bacterial reaction. Journal of Biological Chemistry 268, 11838-11844.
[0830] Fishel, R., Lescoe, M. K., Rao, M. R. S., Copeland, N. G., Jenkins, N. A., Garber, J., Kane, M., and Kolodner, R. (1993). The human mutator gene homolog MSH2 and its association with hereditary nonpolyposis colon cancer. Cell 75, 1027-1038.
[0831] Geng, H., Du, C., Chen, S., Salerno, V., Manfredi, C., and Hsieh, P. (2011). In vitro studies of DNA mismatch repair proteins. Analytical Biochemistry 413, 179-184.
[0832] Genschel, J., Bazemore, L. R., and Modrich, P. (2002). Human Exonuclease I Is Required for 5′ and 3′ Mismatch Repair. Journal of Biological Chemistry 277, 13302-13311.
[0833] Genschel, J., Littman, S. J., Drummond, J. T., and Modrich, P. (1998). Isolation of MutSβ from Human Cells and Comparison of the Mismatch Repair Specificities of MutSβ and MutSα. Journal of Biological Chemistry 273, 19895-19901.
[0834] Gilbert, Luke A., Horlbeck, Max A., Adamson, B., Villalta, Jacqueline E., Chen, Y., Whitehead, Evan H., Guimaraes, C., Panning, B., Ploegh, Hidde L., Bassik, Michael C., et al. (2014). Genome-Scale CRISPR-Mediated Control of Gene Repression and Activation. Cell 159, 647-661.
[0835] Gilbert, Luke A., Larson, Matthew H., Morsut, L., Liu. Z., Brar, Gloria A., Torres. Sandra E., Stern-Ginossar, N., Brandman, O., Whitehead, Evan H., Doudna, Jennifer A., et al. (2013). CRISPR-Mediated Modular RNA-Guided Regulation of Transcription in Eukaryotes. Cell 154, 442-451.
[0836] Gueneau. E., Dherin. C., Legrand, P., Tellier-Lebegue, C., Gilquin, B., Bonnesoeur, P., Londino, F., Quemener, C., Le Du, M.-H., Mdrquez, J. A., et al. (2013). Structure of the MutLα C-terminal domain reveals how Mlh1 contributes to Pms1 endonuclease site. Nature Structural & Molecular Biology 20, 461-468.
[0837] Guerrette, S., Acharya, S., and Fishel, R. (1999). The Interaction of the Human MutL Homologues in Hereditary Nonpolyposis Colon Cancer. Journal of Biological Chemistry 274, 6336-6341.
[0838] Gupta, S., Gellert, M., and Yang, W. (2012). Mechanism of mismatch recognition revealed by human MutSβ bound to unpaired DNA loops. Nature Structural & Molecular Biology 19, 72-78.
[0839] Hempelmann, J. A., Scroggins, S. M., Pritchard, C. C., and Salipante, S. J. (2015). MSIplus for Integrated Colorectal Cancer Molecular Testing by Next-Generation Sequencing. The Journal of Molecular Diagnostics 17, 705-714.
[0840] Hussmann, J. A., Ling, J., Ravisankar. P., Yan, J., Cirincione, A., Xu, A., Simpson, D., Yang, D., Bothmer, A., Cotta-Ramusino, C., et al. (2021). Repair-seq enables systematic mapping of DNA repair processes in genome editing. Submitted.
[0841] Iaccarino. I., Marra, G., and Palomba, F. J., J. (1998), hMSH2 and hMSH6 play distinct roles in mismatch binding and contribute differently to the ATPase activity of hMutSalpha. The EMBO Journal 17, 2677-2686.
[0842] Ingram, V. M. (1956). A Specific Chemical Difference Between the Globins of Normal Human and Sickle-Cell Anaemia Hmmoglobin. Nature 178, 792-794.
[0843] Iyer, R. R., Pluciennik, A., Burdett, V., and Modrich, P. L. (2006). DNA Mismatch Repair: Functions and Mechanisms. Chemical Reviews 106, 302-323.
[0844] Jin, S., Lin, Q., Luo, Y., Zhu, Z., Liu, G., Li, Y., Chen, K., Qiu, J.-L., and Gao, C. (2021). Genome-wide specificity of prime editors in plants. Nature Biotechnology.
[0845] Kadyrov, F. A., Dzantiev, L., Constantin, N., and Modrich, P. (2006). Endonucleolytic Function of MutLα in Human Mismatch Repair. Cell 126, 297-308.
[0846] Kim, D. Y., Moon, S. B., Ko, J.-H., Kim. Y.-S., and Kim, D. (2020). Unbiased investigation of specificities of prime editing systems in human cells. Nucleic Acids Research 48, 10576-10589.
[0847] Kim, J. H., Lee, S.-R., Li, L.-H., Park, H.-J., Park, J.-H., Lee, K. Y., Kim, M.-K., Shin, B. A., and Choi, S.-Y. (2011). High Cleavage Efficiency of a 2A Peptide Derived from Porcine Teschovirus-1 in Human Cell Lines, Zebrafish and Mice. PLoS ONE 6, e18556.
[0848] Kunkel, T. A., and Erie, D. A. (2005). DNA mismatch repair. Annu Rev Biochem 74, 681-710.
[0849] Lahue, R. S., Au, K. G., and Modrich. P. (1989). DNA mismatch correction in a defined system. Science 245, 160.
[0850] Leach. F. S., Nicolaides. N. C., Papadopoulos, N., Liu, B., Jen, J., Parsons, R., Peltomaki, P., Sistonen, P., Aaltonen, L. A., Nystrom-Lahti, M., et al. (1993). Mutations of a mutS homolog in hereditary nonpolyposis colorectal cancer. Cell 75, 1215-1225.
[0851] Li, G.-M. (2008). Mechanisms and functions of DNA mismatch repair. Cell Research 18, 85-98.
[0852] Lin, Q., Zong. Y., Xue, C., Wang, S., Jin, S., Zhu, Z., Wang, Y., Anzalone, A. V., Raguram, A., Doman, J. L., et al. (2020). Prime genome editing in rice and wheat. Nature Biotechnology 38, 582-585.
[0853] Liu, P., Liang, S.-Q., Zheng, C., Mintzer, E., Zhao, Y. G., Ponnienselvan, K., Mir, A., Sontheimer, E. J., Gao, G., Flotte, T. R., et al. (2021). Improved prime editors enable pathogenic allele correction and cancer modelling in adult mice. Nature Communications 12.
[0854] Liu, S., Wang, Q., Yu, X., Li, Y., Guo, Y., Liu, Z., Sun, F., Hou, W., Li, C., Wu, L., et al. (2018). HIV-1 inhibition in cells with CXCR4 mutant genome created by CRISPR-Cas9 and piggyBac recombinant technologies. Scientific Reports 8.
[0855] Liu, Y., Li, X., He. S., Huang. S., Li, C., Chen. Y., Liu. Z., Huang, X., and Wang. X. (2020). Efficient generation of mouse models with the prime editing system. Cell Discovery 6.
[0856] Lujan, S. A., Clausen, A. R., Clark, A. B., MacAlpine, H. K., MacAlpine. D. M., Malc, E. P., Mieczkowski, P. A., Burkholder, A. B., Fargo, D. C., Gordenin, D. A., et al. (2014). Heterogeneous polymerase fidelity and mismatch repair bias genome variation and composition. Genome Res 24, 1751-1764.
[0857] Mead, S., Whitfield, J., Poulter, M., Shah, P., Uphill, J., Campbell, T., Al-Dujaily, H., Hummerich, H., Beck, J., Mein. C. A., et al. (2009). A Novel Protective Prion Protein Variant that Colocalizes with Kuru Exposure. New England Journal of Medicine 361, 2056-2065.
[0858] Nelson, J. W., Randolph, P. B., Shen. S. P., Everette, K. A., Chen, P. J., Anzalone. A. V., Newby, G. A., An, M., Chen, J. C., and Liu, D. R. (2021). Engineered pegRNAs that improve prime editing efficiency. Submitted.
[0859] Olson, H. E., Demarest, S. T., Pestana-Knight, E. M., Swanson, L. C., Iqbal, S., Lal, D., Leonard, H., Cross, J. H., Devinsky, O., and Benke, T. A. (2019). Cyclin-Dependent Kinase-Like 5 Deficiency Disorder: Clinical Review. Pediatric Neurology 97, 18-25.
[0860] Parsons, R., Li, G.-M., Longley, M. J., Fang, W.-H., Papadopoulos, N., Jen. J., De La Chapelle, A., Kinzler, K. W., Vogelstein, B., and Modrich, P. (1993). Hypermutability and mismatch repair deficiency in RER+ tumor cells. Cell 75, 1227-1236.
[0861] Petri, K., Zhang, W., Ma, J., Schmidts, A., Lee, H., Horng, J. E., Kim, D. Y., Kurt, I. C., Clement, K., Hsu, J. Y., et al. (2021). CRISPR prime editing with ribonucleoprotein complexes in zebrafish and primary human cells. Nature Biotechnology.
[0862] Plotz, G., Raedle, J., Brieger, A., Trojan, J., and Zeuzem, S. (2003). N-terminus of hMLH1 confers interaction of hMutL and hMutL with hMutS. Nucleic Acids Research 31, 3217-3226.
[0863] Pluciennik. A., Dzantiev, L., Iyer, R. R., Constantin, N., Kadyrov, F. A., and Modrich. P. (2010). PCNA function in the activation and strand direction of MutL endonuclease in mismatch repair. Proceedings of the National Academy of Sciences 107, 16066-16071.
[0864] Ran, F. A., Cong, L., Yan, W. X., Scott, D. A., Gootenberg, J. S., Kriz, A. J., Zetsche, B., Shalem, O., Wu, X., Makarova, K. S., et al. (2015). In vivo genome editing using Staphylococcus aureus Cas9. Nature 520, 186-191.
[0865] Räschle, M., Dufner, P., Marra, G., and Jiricny, J. (2002). Mutations within the hMLH1 and hPMS2 Subunits of the Human MutLα Mismatch Repair Factor Affect Its ATPase Activity, but Not Its Ability to Interact with hMutSα. Journal of Biological Chemistry 277, 21810-21820.
[0866] Schene, I. F., Joore, I. P., Oka. R., Mokry. M., Van Vugt. A. H. M., Van Boxtel, R., Van Der Doef, H. P. J., Van Der Laan, L. J. W., Verstegen, M. M. A., Van Hasselt, P. M., et al. (2020). Prime editing for functional repair in patient-derived disease models. Nature Communications 11.
[0867] Shcherbakova, P. V., and Kunkel, T. A. (1999). Mutator phenotypes conferred by MLH1 overexpression and by heterozygosity for mlh1 mutations. Molecular and cellular biology 19, 3177-3183.
[0868] Sockolosky. J. T., Trotta, E., Parisi, G., Picton. L., Su, L. L., Le, A. C., Chhabra. A., Silveria, S. L., George, B. M., King, I. C., et al. (2018). Selective targeting of engineered T cells using orthogonal IL-2 cytokine-receptor complexes. Science 359, 1037-1042.
[0869] Spencer, J. M., and Zhang, X. (2017). Deep mutational scanning of S. pyogenes Cas9 reveals important functional domains. Scientific Reports 7.
[0870] Strand, M., Prolla. T. A., Liskay, R. M., and Petes, T. D. (1993). Destabilization of tracts of simple repetitive DNA in yeast by mutations affecting DNA mismatch repair. Nature 365, 274-276.
[0871] Su, S. S., Lahue, R. S., Au, K. G., and Modrich, P. (1988). Mispair specificity of methyl-directed DNA mismatch correction in vitro. Journal of Biological Chemistry 263, 6829-6835.
[0872] Sugawara, N., Goldfarb, T., Studamire, B., Alani, E., and Haber, J. E. (2004). Heteroduplex rejection during single-strand annealing requires Sgs1 helicase and mismatch repair proteins Msh2 and Msh6 but not Pms1. Proceedings of the National Academy of Sciences 101, 9315-9320.
[0873] Supek. F., and Lehner, B. (2015). Differential DNA mismatch repair underlies mutation rate variation across the human genome. Nature 521, 81-84.
[0874] Sürün, D., Schneider. A., Mircetic, J., Neumann. K., Lansing, F., Paszkowski-Rogacz. M., Hänchen, V., Lee-Kirsch. M. A., and Buchholz. F. (2020). Efficient Generation and Correction of Mutations in Human iPS Cells Utilizing mRNAs of CRISPR Base Editors and Prime Editors. Genes 11, 511.
[0875] Thomas. D. C., Roberts, J. D., and Kunkel, T. A. (1991). Heteroduplex repair in extracts of human HeLa cells. Journal of Biological Chemistry 266, 3744-3751.
[0876] Tomer, G., Buermeyer, A. B., Nguyen, M. M., and Liskay, R. M. (2002). Contribution of human mlh1 and pms2 ATPase activities to DNA mismatch repair. J Biol Chem 277, 21801-21809.
[0877] Tran, H. T., Keen, J. D., Kricker, M., Resnick, M. A., and Gordenin, D. A. (1997). Hypermutability of homonucleotide runs in mismatch repair and DNA polymerase proofreading yeast mutants. Molecular and Cellular Biology 17, 2859-2865.
[0878] Trojan. J., Zeuzem, S., Randolph. A., Hemmerle, C., Brieger, A., Raedle, J., Plotz, G., Jiricny, J., and Marra, G. (2002). Functional analysis of hMLH1 variants and HNPCC-related mutations using a human expression system. Gastroenterology 122, 211-219.
[0879] Tsai, S. Q., Nguyen, N. T., Malagon-Lopez, J., Topkar, V. V., Aryee, M. J., and Joung, J. K. (2017). CIRCLE-seq: a highly sensitive in vitro screen for genome-wide CRISPR-Cas9 nuclease off-targets. Nature Methods 14, 607-614.
[0880] Umar, A., Boland, C. R., Terdiman, J. P., Syngal, S., Chapelle, A. D. L., Ruschoff, J., Fishel, R., Lindor, N. M., Burgart, L. J., Hamelin. R., et al. (2004). Revised Bethesda Guidelines for Hereditary Nonpolyposis Colorectal Cancer (Lynch Syndrome) and Microsatellite Instability. JNCI Journal of the National Cancer Institute 96, 261-268.
[0881] Umar. A., Boyer, J. C., and Kunkel, T. A. (1994). DNA loop repair by human cell extracts. Science 266, 814.
[0882] Warren, J. J., Pohlhaus, T. J., Changela, A., Iyer, R. R., Modrich, P. L., and Beese, Lorena S. (2007). Structure of the Human MutSα DNA Lesion Recognition Complex. Molecular Cell 26, 579-592.
[0883] Wu, J., Corbett, A. H., and Berland, K. M. (2009). The Intracellular Mobility of Nuclear Import Receptors and NLS Cargoes. Biophysical Journal 96, 3840-3849.
[0884] Zhang, Y., Yuan. F., Presnell, S. R., Tian. K., Gao, Y., Tomkinson, A. E., Gu, L., and Li, G.-M. (2005). Reconstitution of 5′-Directed Human Mismatch Repair in a Purified System. Cell 122, 693-705.
[0885] Zhou, B. P., Liao, Y., Xia, W., Spohn, B., Lee, M.-H., and Hung, M.-C. (2001). Cytoplasmic localization of p21Cip1/WAFI by Akt-induced phosphorylation in HER-2/neu-overexpressing cells. Nature Cell Biology 3, 245-252.

### EQUIVALENTS AND SCOPE

[0886] In the articles such as “a,” “an,” and “the” may mean one or more than one unless indicated to the contrary or otherwise evident from the context. Embodiments or descriptions that include “or” between one or more members of a group are considered satisfied if one, more than one, or all of the group members are present in, employed in, or otherwise relevant to a given product or process unless indicated to the contrary or otherwise evident from the context. The invention includes embodiments in which exactly one member of the group is present in, employed in, or otherwise relevant to a given product or process. The invention includes embodiments in which more than one, or all of the group members are present in, employed in, or otherwise relevant to a given product or process.

[0887] Furthermore, the disclosure encompasses all variations, combinations, and permutations in which one or more limitations, elements, clauses, and descriptive terms from one or more of the listed claims is introduced into another claim. For example, any claim that is dependent on another claim can be modified to include one or more limitations found in any other claims that is dependent on the same base claim. Where elements are presented as lists, e.g., in Markush group format, each subgroup of the elements is also disclosed, and any element(s) can be removed from the group. It should it be understood that, in general, where the invention, or aspects of the invention, is/are referred to as comprising particular elements and/or features, certain embodiments of the disclosure or aspects of the disclosure consist, or consist essentially of, such elements and/or features. For purposes of simplicity, those embodiments have not been specifically set forth in haec verba herein. It is also noted that the terms “comprising” and “containing” are intended to be open and permits the inclusion of additional elements or steps. Where ranges are given, endpoints are included. Furthermore, unless otherwise indicated or otherwise evident from the context and understanding of one of ordinary skill in the art, values that are expressed as ranges can assume any specific value or sub-range within the stated ranges in different embodiments of the invention, to the tenth of the unit of the lower limit of the range, unless the context clearly dictates otherwise.

[0888] This application refers to various issued patents, published patent applications, journal articles, and other publications, all of which are incorporated herein by reference. If there is a conflict between any of the incorporated references and the instant specification, the specification shall control. In addition, any particular embodiment of the present invention that falls within the prior art may be explicitly excluded from any one or more of the embodiments. Because such embodiments are deemed to be known to one of ordinary skill in the art, they may be excluded even if the exclusion is not set forth explicitly herein. Any particular embodiment of the invention can be excluded from any embodiment, for any reason, whether or not related to the existence of prior art.

[0889] Those skilled in the art will recognize or be able to ascertain using no more than routine experimentation many equivalents to the specific embodiments described herein. The scope of the present embodiments described herein is not intended to be limited to the above Description, but rather is as set forth in the appended embodiments. Those of ordinary skill in the art will appreciate that various changes and modifications to this description may be made without departing from the spirit or scope of the present invention, as defined in the following embodiments.

LENGTHY TABLES
The patent application contains a lengthy table section. A copy of the table is available in electronic form from the USPTO web site (https://seqdata.uspto.gov/docdetail?docId=US20250327045A1). An electronic copy of the table will also be available from the USPTO upon request and payment of the fee set forth in 37 CFR 1.19(b)(3).

The application's sequence listing, which the Patent Office published only in electronic form, follows.

SEQUENCE LISTING (5660 sequences)

SEQ ID NO: 1 - protein, 30 aa, Artificial Sequence
  Synthetic
MDSLLMNRRKFLYQFKNVRWAKGRRETYLC

SEQ ID NO: 2 - protein, 1368 aa, Streptococcus pyogenes [sequence omitted]

SEQ ID NO: 3 - DNA, 4104 bp, Streptococcus pyogenes
atggataaaaaatatagcattggcctggatattggcaccaacagcgtgggctgggcggtgattaccgatgaatataaagtgccgagcaaaaaatttaaagtgctgggcaacaccgatcgccatagcattaaaaaaaacctgattggcgcgctgctgtttgatagcggcgaaaccgcggaagcgacccgcctgaaacgcaccgcgcgccgccgctatacccgccgcaaaaaccgcatttgctatctgcaggaaatttttagcaacgaaatggcgaaagtggatgatagcttttttcatcgcctggaagaaagctttctggtggaagaagataaaaaacatgaacgccatccgatttttggcaacattgtggatgaagtggcgtatcatgaaaaatatccgaccatttatcatctgcgcaaaaaactggtggatagcaccgataaagcggatctgcgcctgatttatctggcgctggcgcatatgattaaatttcgcggccattttctgattgaaggcgatctgaacccggataacagcgatgtggataaactgtttattcagctggtgcagacctataaccagctgtttgaagaaaacccgattaacgcgagcggcgtggatgcgaaagcgattctgagcgcgcgcctgagcaaaagccgccgcctggaaaacctgattgcgcagctgccgggcgaaaaaaaaaacggcctgtttggcaacctgattgcgctgagcctgggcctgaccccgaactttaaaagcaactttgatctggcggaagatgcgaaactgcagctgagcaaagatacctatgatgatgatctggataacctgctggcgcagattggcgatcagtatgcggatctgtttctggcggcgaaaaacctgagcgatgcgattctgctgagcgatattctgcgcgtgaacaccgaaattaccaaagcgccgctgagcgcgagcatgattaaacgctatgatgaacatcatcaggatctgaccctgctgaaagcgctggtgcgccagcagctgccggaaaaatataaagaaattttttttgatcagagcaaaaacggctatgcgggctatattgatggcggcgcgagccaggaagaattttataaatttattaaaccgattctggaaaaaatggatggcaccgaagaactgctggtgaaactgaaccgcgaagatctgctgcgcaaacagcgcacctttgataacggcagcattccgcatcagattcatctgggcgaactgcatgcgattctgcgccgccaggaagatttttatccgtttctgaaagataaccgcgaaaaaattgaaaaaattctgacctttcgcattccgtattatgtgggcccgctggcgcgcggcaacagccgctttgcgtggatgacccgcaaaagcgaagaaaccattaccccgtggaactttgaagaagtggtggataaaggcgcgagcgcgcagagctttattgaacgcatgaccaactttgataaaaacctgccgaacgaaaaagtgctgccgaaacatagcctgctgtatgaatattttaccgtgtataacgaactgaccaaagtgaaatatgtgaccgaaggcatgcgcaaaccggcgtttctgagcggcgaacagaaaaaagcgattgtggatctgctgtttaaaaccaaccgcaaagtgaccgtgaaacagctgaaagaagattattttaaaaaaattgaatgctttgatagcgtggaaattagcggcgtggaagatcgctttaacgcgagcctgggcacctatcatgatctgctgaaaattattaaagataaagattttctggataacgaagaaaacgaagatattctggaagatattgtgctgaccctgaccctgtttgaagatcgcgaaatgattgaagaacgcctgaaaacctatgcgcatctgtttgatgataaagtgatgaaacagctgaaacgccgccgctataccggctggggccgcctgagccgcaaactgattaacggcattcgcgataaacagagcggcaaaaccattctggattttctgaaaagcgatggctttgcgaaccgcaactttatgcagctgattcatgatgatagcctgacctttaaagaagatattcagaaagcgcaggtgagcggccagggcgatagcctgcatgaacatattgcgaacctggcgggcagcccggcgattaaaaaaggcattctgcagaccgtgaaagtggtggatgaactggtgaaagtgatgggccgccataaaccggaaaacattgtgattgaaatggcgcgcgaaaaccagaccacccagaaaggccagaaaaacagccgcgaacgcatgaaacgcattgaagaaggcattaaagaactgggcagccagattctgaaagaacatccggtggaaaacacccagctgcagaacgaaaaactgtatctgtattatctgcagaacggccgcgatatgtatgtggatcaggaactggatattaaccgcctgagcgattatgatgtggatcatattgtgccgcagagctttctgaaagatgatagcattgataacaaagtgctgacccgcagcgataaaaaccgcggcaaaagcgataacgtgccgagcgaagaagtggtgaaaaaaatgaaaaactattggcgccagctgctgaacgcgaaactgattacccagcgcaaatttgataacctgaccaaagcggaacgcggcggcctgagcgaactggataaagcgggctttattaaacgccagctggtggaaacccgccagattaccaaacatgtggcgcagattctggatagccgcatgaacaccaaatatgatgaaaacgataaactgattcgcgaagtgaaagtgattaccctgaaaagcaaactggtgagcgattttcgcaaagattttcagttttataaagtgcgcgaaattaacaactatcatcatgcgcatgatgcgtatctgaacgcggtggtgggcaccgcgctgattaaaaaatatccgaaactggaaagcgaatttgtgtatggcgattataaagtgtatgatgtgcgcaaaatgattgcgaaaagcgaacaggaaattggcaaagcgaccgcgaaatattttttttatagcaacattatgaacttttttaaaaccgaaattaccctggcgaacggcgaaattcgcaaacgcccgctgattgaaaccaacggcgaaaccggcgaaattgtgtgggataaaggccgcgattttgcgaccgtgcgcaaagtgctgagcatgccgcaggtgaacattgtgaaaaaaaccgaagtgcagaccggcggctttagcaaagaaagcattctgccgaaacgcaacagcgataaactgattgcgcgcaaaaaagattgggatccgaaaaaatatggcggctttgatagcccgaccgtggcgtatagcgtgctggtggtggcgaaagtggaaaaaggcaaaagcaaaaaactgaaaagcgtgaaagaactgctgggcattaccattatggaacgcagcagctttgaaaaaaacccgattgattttctggaagcgaaaggctataaagaagtgaaaaaagatctgattattaaactgccgaaatatagcctgtttgaactggaaaacggccgcaaacgcatgctggcgagcgcgggcgaactgcagaaaggcaacgaactggcgctgccgagcaaatatgtgaactttctgtatctggcgagccattatgaaaaactgaaaggcagcccggaagataacgaacagaaacagctgtttgtggaacagcataaacattatctggatgaaattattgaacagattagcgaatttagcaaacgcgtgattctggcggatgcgaacctggataaagtgctgagcgcgtataacaaacatcgcgataaaccgattcgcgaacaggcggaaaacattattcatctgtttaccctgaccaacctgggcgcgccggcggcgtttaaatattttgataccaccattgatcgcaaacgctataccagcaccaaagaagtgctggatgcgaccctgattcatcagagcattaccggcctgtatgaaacccgcattgatctgagccagctgggcggcgat

SEQ ID NO: 4 - DNA, 4104 bp, Streptococcus pyogenes
atggataagaaatactcaataggcttagatatcggcacaaatagcgtcggatgggcggtgatcactgatgattataaggttccgtctaaaaagttcaaggttctgggaaatacagaccgccacagtatcaaaaaaaatcttataggggctcttttatttggcagtggagagacagcggaagcgactcgtctcaaacggacagctcgtagaaggtatacacgtcggaagaatcgtatttgttatctacaggagattttttcaaatgagatggcgaaagtagatgatagtttctttcatcgacttgaagagtcttttttggtggaagaagacaagaagcatgaacgtcatcctatttttggaaatatagtagatgaagttgcttatcatgagaaatatccaactatctatcatctgcgaaaaaaattggcagattctactgataaagcggatttgcgcttaatctatttggccttagcgcatatgattaagtttcgtggtcattttttgattgagggagatttaaatcctgataatagtgatgtggacaaactatttatccagttggtacaaatctacaatcaattatttgaagaaaaccctattaacgcaagtagagtagatgctaaagcgattctttctgcacgattgagtaaatcaagacgattagaaaatctcattgctcagctccccggtgagaagagaaatggcttgtttgggaatctcattgctttgtcattgggattgacccctaattttaaatcaaattttgatttggcagaagatgctaaattacagctttcaaaagatacttacgatgatgatttagataatttattggcgcaaattggagatcaatatgctgatttgtttttggcagctaagaatttatcagatgctattttactttcagatatcctaagagtaaatagtgaaataactaaggctcccctatcagcttcaatgattaagcgctacgatgaacatcatcaagacttgactcttttaaaagctttagttcgacaacaacttccagaaaagtataaagaaatcttttttgatcaatcaaaaaacggatatgcaggttatattgatgggggagctagccaagaagaattttataaatttatcaaaccaattttagaaaaaatggatggtactgaggaattattggtgaaactaaatcgtgaagatttgctgcgcaagcaacggacctttgacaacggctctattccccatcaaattcacttgggtgagctgcatgctattttgagaagacaagaagacttttatccatttttaaaagacaatcgtgagaagattgaaaaaatcttgacttttcgaattccttattatgttggtccattggcgcgtggcaatagtcgttttgcatggatgactcggaagtctgaagaaacaattaccccatggaattttgaagaagttgtcgataaaggtgcttcagctcaatcatttattgaacgcatgacaaactttgataaaaatcttccaaatgaaaaagtactaccaaaacatagtttgctttatgagtattttacggtttataacgaattgacaaaggtcaaatatgttactgagggaatgcgaaaaccagcatttctttcaggtgaacagaagaaagccattgttgatttactcttcaaaacaaatcgaaaagtaaccgttaagcaattaaaagaagattatttcaaaaaaatagaatgttttgatagtgttgaaatttcaggagttgaagatagatttaatgcttcattaggcgcctaccatgatttgctaaaaattattaaagataaagattttttggataatgaagaaaatgaagatatcttagaggatattgttttaacattgaccttatttgaagatagggggatgattgaggaaagacttaaaacatatgctcacctctttgatgataaggtgatgaaacagcttaaacgtcgccgttatactggttggggacgtttgtctcgaaaattgattaatggtattagggataagcaatctggcaaaacaatattagattttttgaaatcagatggttttgccaatcgcaattttatgcagctgatccatgatgatagtttgacatttaaagaagatattcaaaaagcacaggtgtctggacaaggccatagtttacatgaacagattgctaacttagctggcagtcctgctattaaaaaaggtattttacagactgtaaaaattgttgatgaactggtcaaagtaatggggcataagccagaaaatatcgttattgaaatggcacgtgaaaatcagacaactcaaaagggccagaaaaattcgcgagagcgtatgaaacgaatcgaagaaggtatcaaagaattaggaagtcagattcttaaagagcatcctgttgaaaatactcaattgcaaaatgaaaagctctatctctattatctacaaaatggaagagacatgtatgtggaccaagaattagatattaatcgtttaagtgattatgatgtcgatcacattgttccacaaagtttcattaaagacgattcaatagacaataaggtactaacgcgttctgataaaaatcgtggtaaatcggataacgttccaagtgaagaagtagtcaaaaagatgaaaaactattggagacaacttctaaacgccaagttaatcactcaacgtaagtttgataatttaacgaaagctgaacgtggaggtttgagtgaacttgataaagctggttttatcaaacgccaattggttgaaactcgccaaatcactaagcatgtggcacaaattttggatagtcgcatgaatactaaatacgatgaaaatgataaacttattcgagaggttaaagtgattaccttaaaatctaaattagtttctgacttccgaaaagatttccaattctataaagtacgtgagattaacaattaccatcatgcccatgatgcgtatctaaatgccgtcgttggaactgctttgattaagaaatatccaaaacttgaatcggagtttgtctatggtgattataaagtttatgatgttcgtaaaatgattgctaagtctgagcaagaaataggcaaagcaaccgcaaaatatttcttttactctaatatcatgaacttcttcaaaacagaaattacacttgcaaatggagagattcgcaaacgccctctaatcgaaactaatggggaaactggagaaattgtctgggataaagggcgagattttgccacagtgcgcaaagtattgtccatgccccaagtcaatattgtcaagaaaacagaagtacagacaggcggattctccaaggagtcaattttaccaaaaagaaattcggacaagcttattgctcgtaaaaaagactgggatccaaaaaaatatggtggttttgatagtccaacggtagcttattcagtcctagtggttgctaaggtggaaaaagggaaatcgaagaagttaaaatccgttaaagagttactagggatcacaattatggaaagaagttcctttgaaaaaaatccgattgactttttagaagctaaaggatataaggaagttaaaaaagacttaatcattaaactacctaaatatagtctttttgagttagaaaacggtcgtaaacggatgctggctagtgccggagaattacaaaaaggaaatgagctggctctgccaagcaaatatgtgaattttttatatttagctagtcattatgaaaagttgaagggtagtccagaagataacgaacaaaaacaattgtttgtggagcagcataagcattatttagatgagattattgagcaaatcagtgaattttctaagcgtgttattttagcagatgccaatttagataaagttcttagtgcatataacaaacatagagacaaaccaatacgtgaacaagcagaaaatattattcatttatttacgttgacgaatcttggagctcccgctgcttttaaatattttgatacaacaattgatcgtaaacgatatacgtctacaaaagaagttttagatgccactcttatccatcaatccatcactggtctttatgaaacacgcattgatttgagtcagctaggaggtgactga

SEQ ID NO: 5 - protein, 1367 aa, Streptococcus pyogenes
MDKKYSIGLDIGTNSVGWAVITDDYKVPSKKFKVLGNTDRHSIKKNLIGALLFGSGETAEATRLKRTARRRYTRRKNRICYLQEIFSNEMAKVDDSFFHRLEESFLVEEDKKHERHPIFGNIVDEVAYHEKYPTIYHLRKKLADSTDKADLRLIYLALAHMIKFRGHFLIEGDLNPDNSDVDKLFIQLVQIYNQLFEENPINASRVDAKAILSARLSKSRRLENLIAQLPGEKRNGLFGNLIALSLGLTPNFKSNFDLAEDAKLQLSKDTYDDDLDNLLAQIGDQYADLFLAAKNLSDAILLSDILRVNSEITKAPLSASMIKRYDEHHQDLTLLKALVRQQLPEKYKEIFFDQSKNGYAGYIDGGASQEEFYKFIKPILEKMDGTEELLVKLNREDLLRKQRTFDNGSIPHQIHLGELHAILRRQEDFYPFLKDNREKIEKILTFRIPYYVGPLARGNSRFAWMTRKSEETITPWNFEEVVDKGASAQSFIERMTNFDKNLPNEKVLPKHSLLYEYFTVYNELTKVKYVTEGMRKPAFLSGEQKKAIVDLLFKTNRKVTVKQLKEDYFKKIECFDSVEISGVEDRFNASLGAYHDLLKIIKDKDFLDNEENEDILEDIVLTLTLFEDRGMIEERLKTYAHLFDDKVMKQLKRRRYTGWGRLSRKLINGIRDKQSGKTILDFLKSDGFANRNFMQLIHDDSLTFKEDIQKAQVSGQGHSLHEQIANLAGSPAIKKGILQTVKIVDELVKVMGHKPENIVIEMARENQTTQKGQKNSRERMKRIEEGIKELGSQILKEHPVENTQLQNEKLYLYYLQNGRDMYVDQELDINRLSDYDVDHIVPQSFIKDDSIDNKVLTRSDKNRGKSDNVPSEEVVKKMKNYWRQLLNAKLITQRKFDNLTKAERGGLSELDKAGFIKRQLVETRQITKHVAQILDSRMNTKYDENDKLIREVKVITLKSKLVSDFRKDFQFYKVREINNYHHAHDAYLNAVVGTALIKKYPKLESEFVYGDYKVYDVRKMIAKSEQEIGKATAKYFFYSNIMNFFKTEITLANGEIRKRPLIETNGETGEIVWDKGRDFATVRKVLSMPQVNIVKKTEVQTGGFSKESILPKRNSDKLIARKKDWDPKKYGGFDSPTVAYSVLVVAKVEKGKSKKLKSVKELLGITIMERSSFEKNPIDFLEAKGYKEVKKDLIIKLPKYSLFELENGRKRMLASAGELQKGNELALPSKYVNFLYLASHYEKLKGSPEDNEQKQLFVEQHKHYLDEIIEQISEFSKRVILADANLDKVLSAYNKHRDKPIREQAENIIHLFTLTNLGAPAAFKYFDTTIDRKRYTSTKEVLDATLIHQSITGLYETRIDLSQLGGD

SEQ ID NO: 6 - DNA, 4212 bp, Streptococcus pyogenes
atggataaaaagtattctattggtttagacatcggcactaattccgttggatgggctgtcataaccgatgaatacaaagtaccttcaaagaaatttaaggtgttggggaacacagaccgtcattcgattaaaaagaatcttatcggtgccctcctattcgatagtggcgaaacggcagaggcgactcgcctgaaacgaaccgctcggagaaggtatacacgtcgcaagaaccgaatatgttacttacaagaaatttttagcaatgagatggccaaagttgacgattctttctttcaccgtttggaagagtccttccttgtcgaagaggacaagaaacatgaacggcaccccatctttggaaacatagtagatgaggtggcatatcatgaaaagtacccaacgatttatcacctcagaaaaaagctagttgactcaactgataaagcggacctgaggttaatctacttggctcttgcccatatgataaagttccgtgggcactttctcattgagggtgatctaaatccggacaactcggatgtcgacaaactgttcatccagttagtacaaacctataatcagttgtttgaagagaaccctataaatgcaagtggcgtggatgcgaaggctattcttagcgcccgcctctctaaatcccgacggctagaaaacctgatcgcacaattacccggagagaagaaaaatgggttgttcggtaaccttatagcgctctcactaggcctgacaccaaattttaagtcgaacttcgacttagctgaagatgccaaattgcagcttagtaaggacacgtacgatgacgatctcgacaatctactggcacaaattggagatcagtatgcggacttatttttggctgccaaaaaccttagcgatgcaatcctcctatctgacatactgagagttaatactgagattaccaaggcgccgttatccgcttcaatgatcaaaaggtacgatgaacatcaccaagacttgacacttctcaaggccctagtccgtcagcaactgcctgagaaatataaggaaatattctttgatcagtcgaaaaacgggtacgcaggttatattgacggcggagcgagtcaagaggaattctacaagtttatcaaacccatattagagaagatggatgggacggaagagttgcttgtaaaactcaatcgcgaagatctactgcgaaagcagcggactttcgacaacggtagcattccacatcaaatccacttaggcgaattgcatgctatacttagaaggcaggaggatttttatccgttcctcaaagacaatcgtgaaaagattgagaaaatcctaacctttcgcataccttactatgtgggacccctggcccgagggaactctcggttcgcatggatgacaagaaagtccgaagaaacgattactccatggaattttgaggaagttgtcgataaaggtgcgtcagctcaatcgttcatcgagaggatgaccaactttgacaagaatttaccgaacgaaaaagtattgcctaagcacagtttactttacgagtatttcacagtgtacaatgaactcacgaaagttaagtatgtcactgagggcatgcgtaaacccgcctttctaagcggagaacagaagaaagcaatagtagatctgttattcaagaccaaccgcaaagtgacagttaagcaattgaaagaggactactttaagaaaattgaatgcttcgattctgtcgagatctccggggtagaagatcgatttaatgcgtcacttggtacgtatcatgacctcctaaagataattaaagataaggacttcctggataacgaagagaatgaagatatcttagaagatatagtgttgactcttaccctctttgaagatcgggaaatgattgaggaaagactaaaaacatacgctcacctgttcgacgataaggttatgaaacagttaaagaggcgtcgctatacgggctggggacgattgtcgcggaaacttatcaacgggataagagacaagcaaagtggtaaaactattctcgattttctaaagagcgacggcttcgccaataggaactttatgcagctgatccatgatgactctttaaccttcaaagaggatatacaaaaggcacaggtttccggacaaggggactcattgcacgaacatattgcgaatcttgctggttcgccagccatcaaaaagggcatactccagacagtcaaagtagtggatgagctagttaaggtcatgggacgtcacaaaccggaaaacattgtaatcgagatggcacgcgaaaatcaaacgactcagaaggggcaaaaaaacagtcgagagcggatgaagagaatagaagagggtattaaagaactgggcagccagatcttaaaggagcatcctgtggaaaatacccaattgcagaacgagaaactttacctctattacctacaaaatggaagggacatgtatgttgatcaggaactggacataaaccgtttatctgattacgacgtcgatcacattgtaccccaatcctttttgaaggacgattcaatcgacaataaagtgcttacacgctcggataagaaccgagggaaaagtgacaatgttccaagcgaggaagtcgtaaagaaaatgaagaactattggcggcagctcctaaatgcgaaactgataacgcaaagaaagttcgataacttaactaaagctgagaggggtggcttgtctgaacttgacaaggccggatttattaaacgtcagctcgtggaaacccgccaaatcacaaagcatgttgcacagatactagattcccgaatgaatacgaaatacgacgagaacgataagctgattcgggaagtcaaagtaatcactttaaagtcaaaattggtgtcggacttcagaaaggattttcaattctataaagttagggagataaataactaccaccatgcgcacgacgcttatcttaatgccgtcgtagggaccgcactcattaagaaatacccgaagctagaaagtgagtttgtgtatggtgattacaaagtttatgacgtccgtaagatgatcgcgaaaagcgaacaggagataggcaaggctacagccaaatacttcttttattctaacattatgaatttctttaagacggaaatcactctggcaaacggagagatacgcaaacgacctttaattgaaaccaatggggagacaggtgaaatcgtatgggataagggccgggacttcgcgacggtgagaaaagttttgtccatgccccaagtcaacatagtaaagaaaactgaggtgcagaccggagggttttcaaaggaatcgattcttccaaaaaggaatagtgataagctcatcgctcgtaaaaaggactgggacccgaaaaagtacggtggcttcgatagccctacagttgcctattctgtcctagtagtggcaaaagttgagaagggaaaatccaagaaactgaagtcagtcaaagaattattggggataacgattatggagcgctcgtcttttgaaaagaaccccatcgacttccttgaggcgaaaggttacaaggaagtaaaaaaggatctcataattaaactaccaaagtatagtctgtttgagttagaaaatggccgaaaacggatgttggctagcgccggagagcttcaaaaggggaacgaactcgcactaccgtctaaatacgtgaatttcctgtatttagcgtcccattacgagaagttgaaaggttcacctgaagataacgaacagaagcaactttttgttgagcagcacaaacattatctcgacgaaatcatagagcaaatttcggaattcagtaagagagtcatcctagctgatgccaatctggacaaagtattaagcgcatacaacaagcacagggataaacccatacgtgagcaggcggaaaatattatccatttgtttactcttaccaacctcggcgctccagccgcattcaagtattttgacacaacgatagatcgcaaacgatacacttctaccaaggaggtgctagacgcgacactgattcaccaatccatcacgggattatatgaaactcggatagatttgtcacagcttgggggtgacggatcccccaagaagaagaggaaagtctcgagcgactacaaagaccatgacggtgattataaagatcatgacatcgattacaaggatgacgatgacaaggctgcagga

SEQ ID NO: 7 - protein, 1404 aa, Streptococcus pyogenes
MDKKYSIGLDIGTNSVGWAVITDEYKVPSKKFKVLGNTDRHSIKKNLIGALLFDSGETAEATRLKRTARRRYTRRKNRICYLQEIFSNEMAKVDDSFFHRLEESFLVEEDKKHERHPIFGNIVDEVAYHEKYPTIYHLRKKLVDSTDKADLRLIYLALAHMIKFRGHFLIEGDLNPDNSDVDKLFIQLVQTYNQLFEENPINASGVDAKAILSARLSKSRRLENLIAQLPGEKKNGLFGNLIALSLGLTPNFKSNFDLAEDAKLQLSKDTYDDDLDNLLAQIGDQYADLFLAAKNLSDAILLSDILRVNTEITKAPLSASMIKRYDEHHQDLTLLKALVRQQLPEKYKEIFFDQSKNGYAGYIDGGASQEEFYKFIKPILEKMDGTEELLVKLNREDLLRKQRTFDNGSIPHQIHLGELHAILRRQEDFYPFLKDNREKIEKILTFRIPYYVGPLARGNSRFAWMTRKSEETITPWNFEEVVDKGASAQSFIERMTNFDKNLPNEKVLPKHSLLYEYFTVYNELTKVKYVTEGMRKPAFLSGEQKKAIVDLLFKTNRKVTVKQLKEDYFKKIECFDSVEISGVEDRFNASLGTYHDLLKIIKDKDFLDNEENEDILEDIVLTLTLFEDREMIEERLKTYAHLFDDKVMKQLKRRRYTGWGRLSRKLINGIRDKQSGKTILDFLKSDGFANRNFMQLIHDDSLTFKEDIQKAQVSGQGDSLHEHIANLAGSPAIKKGILQTVKVVDELVKVMGRHKPENIVIEMARENQTTQKGQKNSRERMKRIEEGIKELGSQILKEHPVENTQLQNEKLYLYYLQNGRDMYVDQELDINRLSDYDVDHIVPQSFLKDDSIDNKVLTRSDKNRGKSDNVPSEEVVKKMKNYWRQLLNAKLITQRKFDNLTKAERGGLSELDKAGFIKRQLVETRQITKHVAQILDSRMNTKYDENDKLIREVKVITLKSKLVSDFRKDFQFYKVREINNYHHAHDAYLNAVVGTALIKKYPKLESEFVYGDYKVYDVRKMIAKSEQEIGKATAKYFFYSNIMNFFKTEITLANGEIRKRPLIETNGETGEIVWDKGRDFATVRKVLSMPQVNIVKKTEVQTGGFSKESILPKRNSDKLIARKKDWDPKKYGGFDSPTVAYSVLVVAKVEKGKSKKLKSVKELLGITIMERSSFEKNPIDFLEAKGYKEVKKDLIIKLPKYSLFELENGRKRMLASAGELQKGNELALPSKYVNFLYLASHYEKLKGSPEDNEQKQLFVEQHKHYLDEIIEQISEFSKRVILADANLDKVLSAYNKHRDKPIREQAENIIHLFTLTNLGAPAAFKYFDTTIDRKRYTSTKEVLDATLIHQSITGLYETRIDLSQLGGDGSPKKKRKVSSDYKDHDGDYKDHDIDYKDDDDKAAG

SEQ ID NO: 8 - DNA, 4107 bp, Streptococcus pyogenes
atggataagaaatactcaataggcttagatatcggcacaaatagcgtcggatgggcggtgatcactgatgaatataaggttccgtctaaaaagttcaaggttctgggaaatacagaccgccacagtatcaaaaaaaatcttataggggctcttttatttgacagtggagagacagcggaagcgactcgtctcaaacggacagctcgtagaaggtatacacgtcggaagaatcgtatttgttatctacaggagattttttcaaatgagatggcgaaagtagatgatagtttctttcatcgacttgaagagtcttttttggtggaagaagacaagaagcatgaacgtcatcctatttttggaaatatagtagatgaagttgcttatcatgagaaatatccaactatctatcatctgcgaaaaaaattggtagattctactgataaagcggatttgcgcttaatctatttggccttagcgcatatgattaagtttcgtggtcattttttgattgagggagatttaaatcctgataatagtgatgtggacaaactatttatccagttggtacaaacctacaatcaattatttgaagaaaaccctattaacgcaagtggagtagatgctaaagcgattctttctgcacgattgagtaaatcaagacgattagaaaatctcattgctcagctccccggtgagaagaaaaatggcttatttgggaatctcattgctttgtcattgggtttgacccctaattttaaatcaaattttgatttggcagaagatgctaaattacagctttcaaaagatacttacgatgatgatttagataatttattggcgcaaattggagatcaatatgctgatttgtttttggcagctaagaatttatcagatgctattttactttcagatatcctaagagtaaatactgaaataactaaggctcccctatcagcttcaatgattaaacgctacgatgaacatcatcaagacttgactcttttaaaagctttagttcgacaacaacttccagaaaagtataaagaaatcttttttgatcaatcaaaaaacggatatgcaggttatattgatgggggagctagccaagaagaattttataaatttatcaaaccaattttagaaaaaatggatggtactgaggaattattggtgaaactaaatcgtgaagatttgctgcgcaagcaacggacctttgacaacggctctattccccatcaaattcacttgggtgagctgcatgctattttgagaagacaagaagacttttatccatttttaaaagacaatcgtgagaagattgaaaaaatcttgacttttcgaattccttattatgttggtccattggcgcgtggcaatagtcgttttgcatggatgactcggaagtctgaagaaacaattaccccatggaattttgaagaagttgtcgataaaggtgcttcagctcaatcatttattgaacgcatgacaaactttgataaaaatcttccaaatgaaaaagtactaccaaaacatagtttgctttatgagtattttacggtttataacgaattgacaaaggtcaaatatgttactgaaggaatgcgaaaaccagcatttctttcaggtgaacagaagaaagccattgttgatttactcttcaaaacaaatcgaaaagtaaccgttaagcaattaaaagaagattatttcaaaaaaatagaatgttttgatagtgttgaaatttcaggagttgaagatagatttaatgcttcattaggtacctaccatgatttgctaaaaattattaaagataaagattttttggataatgaagaaaatgaagatatcttagaggatattgttttaacattgaccttatttgaagatagggagatgattgaggaaagacttaaaacatatgctcacctctttgatgataaggtgatgaaacagcttaaacgtcgccgttatactggttggggacgtttgtctcgaaaattgattaatggtattagggataagcaatctggcaaaacaatattagattttttgaaatcagatggttttgccaatcgcaattttatgcagctgatccatgatgatagtttgacatttaaagaagacattcaaaaagcacaagtgtctggacaaggcgatagtttacatgaacatattgcaaatttagctggtagccctgctattaaaaaaggtattttacagactgtaaaagttgttgatgaattggtcaaagtaatggggcggcataagccagaaaatatcgttattgaaatggcacgtgaaaatcagacaactcaaaagggccagaaaaattcgcgagagcgtatgaaacgaatcgaagaaggtatcaaagaattaggaagtcagattcttaaagagcatcctgttgaaaatactcaattgcaaaatgaaaagctctatctctattatctccaaaatggaagagacatgtatgtggaccaagaattagatattaatcgtttaagtgattatgatgtcgatcacattgttccacaaagtttccttaaagacgattcaatagacaataaggtcttaacgcgttctgataaaaatcgtggtaaatcggataacgttccaagtgaagaagtagtcaaaaagatgaaaaactattggagacaacttctaaacgccaagttaatcactcaacgtaagtttgataatttaacgaaagctgaacgtggaggtttgagtgaacttgataaagctggttttatcaaacgccaattggttgaaactcgccaaatcactaagcatgtggcacaaattttggatagtcgcatgaatactaaatacgatgaaaatgataaacttattcgagaggttaaagtgattaccttaaaatctaaattagtttctgacttccgaaaagatttccaattctataaagtacgtgagattaacaattaccatcatgcccatgatgcgtatctaaatgccgtcgttggaactgctttgattaagaaatatccaaaacttgaatcggagtttgtctatggtgattataaagtttatgatgttcgtaaaatgattgctaagtctgagcaagaaataggcaaagcaaccgcaaaatatttcttttactctaatatcatgaacttcttcaaaacagaaattacacttgcaaatggagagattcgcaaacgccctctaatcgaaactaatggggaaactggagaaattgtctgggataaagggcgagattttgccacagtgcgcaaagtattgtccatgccccaagtcaatattgtcaagaaaacagaagtacagacaggcggattctccaaggagtcaattttaccaaaaagaaattcggacaagcttattgctcgtaaaaaagactgggatccaaaaaaatatggtggttttgatagtccaacggtagcttattcagtcctagtggttgctaaggtggaaaaagggaaatcgaagaagttaaaatccgttaaagagttactagggatcacaattatggaaagaagttcctttgaaaaaaatccgattgactttttagaagctaaaggatataaggaagttaaaaaagacttaatcattaaactacctaaatatagtctttttgagttagaaaacggtcgtaaacggatgctggctagtgccggagaattacaaaaaggaaatgagctggctctgccaagcaaatatgtgaattttttatatttagctagtcattatgaaaagttgaagggtagtccagaagataacgaacaaaaacaattgtttgtggagcagcataagcattatttagatgagattattgagcaaatcagtgaattttctaagcgtgttattttagcagatgccaatttagataaagttcttagtgcatataacaaacatagagacaaaccaatacgtgaacaagcagaaaatattattcatttatttacgttgacgaatcttggagctcccgctgcttttaaatattttgatacaacaattgatcgtaaacgatatacgtctacaaaagaagttttagatgccactcttatccatcaatccatcactggtctttatgaaacacgcattgatttgagtcagctaggaggtgactga

SEQ ID NO: 9 - protein, 1378 aa, Lactobacillus fermentum
MKEYHIGLDIGTSSIGWAVTDSQFKLMRIKGKTAIGVRLFEEGKTAAERRTFRTTRRRLKRRKWRLHYLDEIFAPHLQEVDENFLRRLKQSNIHPEDPTKNQAFIGKLLFPDLLKKNERGYPTLIKMRDELPVEQRAHYPVMNIYKLREAMINEDRQFDLREVYLAVHHIVKYRGHFLNNASVDKFKVGRIDFDKSFNVLNEAYEELQNGEGSFTIEPSKVEKIGQLLLDTKMRKLDRQKAVAKLLEVKVADKEETKRNKQIATAMSKLVLGYKADFATVAMANGNEWKIDLSSETSEDEIEKFREELSDAQNDILTEITSLFSQIMLNEIVPNGMSISESMMDRYWTHERQLAEVKEYLATQPASARKEFDQVYNKYIGQAPKERGFDLEKGLKKILSKKENWKEIDELLKAGDFLPKQRTSANGVIPHQMHQQELDRIIEKQAKYYPWLATENPATGERDRHQAKYELDQLVSFRIPYYVGPLVTPEVQKATSGAKFAWAKRKEDGEITPWNLWDKIDRAESAEAFIKRMTVKDTYLLNEDVLPANSLLYQKYNVLNELNNVRVNGRRLSVGIKQDIYTELFKKKKTVKASDVASLVMAKTRGVNKPSVEGLSDPKKFNSNLATYLDLKSIVGDKVDDNRYQTDLENIIEWRSVFEDGEIFADKLTEVEWLTDEQRSALVKKRYKGWGRLSKKLLTGIVDENGQRIIDLMWNTDQNFKEIVDQPVFKEQIDQLNQKAITNDGMTLRERVESVLDDAYTSPQNKKAIWQVVRVVEDIVKAVGNAPKSISIEFARNEGNKGEITRSRRTQLQKLFEDQAHELVKDTSLTEELEKAPDLSDRYYFYFTQGGKDMYTGDPINFDEISTKYDIDHILPQSFVKDNSLDNRVLTSRKENNKKSDQVPAKLYAAKMKPYWNQLLKQGLITQRKFENLTKDVDQNIKYRSLGFVKRQLVETRQVIKLTANILGSMYQEAGTEIIETRAGLTKQLREEFDLPKVREVNDYHHAVDAYLTTFAGQYLNRRYPKLRSFFVYGEYMKFKHGSDLKLRNFNFFHELMEGDKSQGKVVDQQTGELITTRDEVAKSFDRLLNMKYMLVSKEVHDRSDQLYGATIVTAKESGKLTSPIEIKKNRLVDLYGAYTNGTSAFMTIIKFTGNKPKYKVIGIPTTSAASLKRAGKPGSESYNQELHRIIKSNPKVKKGFEIVVPHVSYGQLIVDGDCKFTLASPTVQHPATQLVLSKKSLETISSGYKILKDKPAIANERLIRVFDEVVGQMNRYFTIFDQRSNRQKVADARDKFLSLPTESKYEGAKKVQVGKTEVITNLLMGLHANATQGDLKVLGLATFGFFQSTTGLSLSEDTMIVYQSPTGLFERRICLKDI

SEQ ID NO: 10 - protein, 1053 aa, Staphylococcus aureus
MGKRNYILGLDIGITSVGYGIIDYETRDVIDAGVRLFKEANVENNEGRRSKRGARRLKRRRRHRIQRVKKLLFDYNLLTDHSELSGINPYEARVKGLSQKLSEEEFSAALLHLAKRRGVHNVNEVEEDTGNELSTKEQISRNSKALEEKYVAELQLERLKKDGEVRGSINRFKTSDYVKEAKQLLKVQKAYHQLDQSFIDTYIDLLETRRTYYEGPGEGSPFGWKDIKEWYEMLMGHCTYFPEELRSVKYAYNADLYNALNDLNNLVITRDENEKLEYYEKFQIIENVFKQKKKPTLKQIAKEILVNEEDIKGYRVTSTGKPEFTNLKVYHDIKDITARKEIIENAELLDQIAKILTIYQSSEDIQEELTNLNSELTQEEIEQISNLKGYTGTHNLSLKAINLILDELWHTNDNQIAIFNRLKLVPKKVDLSQQKEIPTTLVDDFILSPVVKRSFIQSIKVINAIIKKYGLPNDIIIELAREKNSKDAQKMINEMQKRNRQTNERIEEIIRTTGKENAKYLIEKIKLHDMQEGKCLYSLEAIPLEDLLNNPFNYEVDHIIPRSVSFDNSFNNKVLVKQEENSKKGNRTPFQYLSSSDSKISYETFKKHILNLAKGKGRISKTKKEYLLEERDINRFSVQKDFINRNLVDTRYATRGLMNLLRSYFRVNNLDVKVKSINGGFTSFLRRKWKFKKERNKGYKHHAEDALIIANADFIFKEWKKLDKAKKVMENQMFEEKQAESMPEIETEQEYKEIFITPHQIKHIKDFKDYKYSHRVDKKPNRKLINDTLYSTRKDDKGNTLIVNNLNGLYDKDNDKLKKLINKSPEKLLMYHHDPQTYQKLKLIMEQYGDEKNPLYKYYEETGNYLTKYSKKDNGPVIKKIKYYGNKLNAHLDITDDYPNSRNKVVKLSLKPYRFDVYLDNGVYKFVTVKNLDVIKKENYYEVNSKCYEEAKKLKKISNQAEFIASFYKNDLIKINGELYRVIGVNNDLLNRIEVNMIDITYREYLENMNDKRPPHIIKTIASKTQSIKKYSTDILGNLYEVKSKKHPQIIKK

SEQ ID NO: 11 - protein, 1409 aa, Streptococcus thermophilus
MLFNKCIIISINLDFSNKEKCMTKPYSIGLDIGTNSVGWAVITDNYKVPSKKMKVLGNTSKKYIKKNLLGVLLFDSGITAEGRRLKRTARRRYTRRRNRILYLQEIFSTEMATLDDAFFQRLDDSFLVPDDKRDSKYPIFGNLVEEKVYHDEFPTIYHLRKYLADSTKKADLRLVYLALAHMIKYRGHFLIEGEFNSKNNDIQKNFQDFLDTYNAIFESDLSLENSKQLEEIVKDKISKLEKKDRILKLFPGEKNSGIFSEFLKLIVGNQADFRKCFNLDEKASLHFSKESYDEDLETLLGYIGDDYSDVFLKAKKLYDAILLSGFLTVTDNETEAPLSSAMIKRYNEHKEDLALLKEYIRNISLKTYNEVFKDDTKNGYAGYIDGKTNQEDFYVYLKNLLAEFEGADYFLEKIDREDFLRKQRTFDNGSIPYQIHLQEMRAILDKQAKFYPFLAKNKERIEKILTFRIPYYVGPLARGNSDFAWSIRKRNEKITPWNFEDVIDKESSAEAFINRMTSFDLYLPEEKVLPKHSLLYETFNVYNELTKVRFIAESMRDYQFLDSKQKKDIVRLYFKDKRKVTDKDIIEYLHAIYGYDGIELKGIEKQFNSSLSTYHDLLNIINDKEFLDDSSNEAIIEEIIHTLTIFEDREMIKQRLSKFENIFDKSVLKKLSRRHYTGWGKLSAKLINGIRDEKSGNTILDYLIDDGISNRNFMQLIHDDALSFKKKIQKAQIIGDEDKGNIKEVVKSLPGSPAIKKGILQSIKIVDELVKVMGGRKPESIVVEMARENQYTNQGKSNSQQRLKRLEKSLKELGSKILKENIPAKLSKIDNNALQNDRLYLYYLQNGKDMYTGDDLDIDRLSNYDIDHIIPQAFLKDNSIDNKVLVSSASNRGKSDDFPSLEVVKKRKTFWYQLLKSKLISQRKFDNLTKAERGGLLPEDKAGFIQRQLVETRQITKHVARLLDEKFNNKKDENNRAVRTVKIITLKSTLVSQFRKDFELYKVREINDFHHAHDAYLNAVIASALLKKYPKLEPEFVYGDYPKYNSFRERKSATEKVYFYSNIMNIFKKSISLADGRVIERPLIEVNEETGESVWNKESDLATVRRVLSYPQVNVVKKVEEQNHGLDRGKPKGLFNANLSSKPKPNSNENLVGAKEYLDPKKYGGYAGISNSFAVLVKGTIEKGAKKKITNVLEFQGISILDRINYRKDKLNFLLEKGYKDIELIIELPKYSLFELSDGSRRMLASILSTNNKRGEIHKGNQIFLSQKFVKLLYHAKRISNTINENHRKYVENHKKEFEELFYYILEFNENYVGAKKNGKLLNSAFQSWQNHSIDELCSSFIGPTGSERKGLFELTSRGSAADFEFLGVKIPRYRDYTPSSLLKDATLIHQSVTGLYETRIDLAKLGEG

SEQ ID NO: 12 - protein, 1402 aa, Lactobacillus crispatus
MKIKNYNLALTPSTSAVGHVEVDDDLNILEPVHHQKAIGVAKFGEGETAEARRLARSARRTTKRRANRINHYFNEIMKPEIDKVDPLMFDRIKQAGLSPLDERKEFRTVIFDRPNIASYYHNQFPTIWHLQKYLMITDEKADIRLIYWALHSLLKHRGHFFNTTPMSQFKPGKLNLKDDMLALDDYNDLEGLSFAVANSPEIEKVIKDRSMHKKEKIAELKKLIVNDVPDKDLAKRNNKIITQIVNAIMGNSFHLNFIFDMDLDKLTSKAWSFKLDDPELDTKFDAISGSMTDNQIGIFETLQKIYSAISLLDILNGSSNVVDAKNALYDKHKRDLNLYFKFLNTLPDEIAKTLKAGYTLYIGNRKKDLLAARKLLKVNVAKNFSQDDFYKLINKELKSIDKQGLQTRFSEKVGELVAQNNFLPVQRSSDNVFIPYQLNAITFNKILENQGKYYDFLVKPNPAKKDRKNAPYELSQLMQFTIPYYVGPLVTPEEQVKSGIPKTSRFAWMVRKDNGAITPWNFYDKVDIEATADKFIKRSIAKDSYLLSELVLPKHSLLYEKYEVFNELSNVSLDGKKLSGGVKQILFNEVFKKTNKVNTSRILKALAKHNIPGSKITGLSNPEEFTSSLQTYNAWKKYFPNQIDNFAYQQDLEKMIEWSTVFEDHKILAKKLDEIEWLDDDQKKFVANTRLRGWGRLSKRLLTGLKDNYGKSIMQRLETTKANFQQIVYKPEFREQIDKISQAAAKNQSLEDILANSYTSPSNRKAIRKTMSVVDEYIKLNHGKEPDKIFLMFQRSEQEKGKQTEARSKQLNRILSQLKADKSANKLFSKQLADEFSNAIKKSKYKLNDKQYFYFQQLGRDALTGEVIDYDELYKYTVLHIIPRSKLTDDSQNNKVLTKYKIVDGSVALKFGNSYSDALGMPIKAFWTELNRLKLIPKGKLLNLTTDFSTLNKYQRDGYIARQLVETQQIVKLLATIMQSRFKHTKIIEVRNSQVANIRYQFDYFRIKNLNEYYRGFDAYLAAVVGTYLYKVYPKARRLFVYGQYLKPKKTNQENQDMHLDSEKKSQGFNFLWNLLYGKQDQIFVNGTDVIAFNRKDLITKMNTVYNYKSQKISLAIDYHNGAMFKATLFPRNDRDTAKTRKLIPKKKDYDTDIYGGYTSNVDGYMLLAEIIKRDGNKQYGFYGVPSRLVSELDTLKKTRYTEYEEKLKEIIKPELGVDLKKIKKIKILKNKVPFNQVIIDKGSKFFITSTSYRWNYRQLILSAESQQTLMDLVVDPDFSNHKARKDARKNADERLIKVYEEILYQVKNYMPMFVELHRCYEKLVDAQKTFKSLKISDKAMVLNQILILLHSNATSPVLEKLGYHTRFTLGKKHNLISENAVLVTQSITGLKENHVSIKQML

SEQ ID NO: 13 - protein, 1385 aa, Pedicoccus damnosus
MTNEKYSIGLDIGTSSIGFAVVNDNNRVIRVKGKNAIGVRLFDEGKAAADRRSFRTTRRSFRTTRRRLSRRRWRLKLLREIFDAYITPVDEAFFIRLKESNLSPKDSKKQYSGDILFNDRSDKDFYEKYPTIYHLRNALMTEHRKFDVREIYLAIHHIMKFRGHFLNATPANNFKVGRLNLEEKFEELNDIYQRVFPDESIEFRTDNLEQIKEVLLDNKRSRADRQRTLVSDIYQSSEDKDIEKRNKAVATEILKASLGNKAKLNVITNVEVDKEAAKEWSITFDSESIDDDLAKIEGQMTDDGHEIIEVLRSLYSGITLSAIVPENHTLSQSMVAKYDLHKDHLKLFKKLINGMTDTKKAKNLRAAYDGYIDGVKGKVLPQEDFYKQVQVNLDDSAEANEIQTYIDQDIFMPKQRTKANGSIPHQLQQQELDQIIENQKAYYPWLAELNPNPDKKRQQLAKYKLDELVTFRVPYYVGPMITAKDQKNQSGAEFAWMIRKEPGNITPWNFDQKVDRMATANQFIKRMTTTDTYLLGEDVLPAQSLLYQKFEVLNELNKIRIDHKPISIEQKQQIFNDLFKQFKNVTIKHLQDYLVSQGQYSKRPLIEGLADEKRFNSSLSTYSDLCGIFGAKLVEENDRQEDLEKIIEWSTIFEDKKIYRAKLNDLTWLTDDQKEKLATKRYQGWGRLSRKLLVGLKNSEHRNIMDILWITNENFMQIQAEPDFAKLVTDANKGMLEKTDSQDVINDLYTSPQNKKAIRQILLVVHDIQNAMHGQAPAKIHVEFARGEERNPRRSVQRQRQVEAAYEKVSNELVSAKVRQEFKEAINNKRDFKDRLFLYFMQGGIDIYTGKQLNIDQLSSYQIDHILPQAFVKDDSLTNRVLTNENQVKADSVPIDIFGKKMLSVWGRMKDQGLISKGKYRNLTMNPENISAHTENGFINRQLVETRQVIKLAVNILADEYGDSTQIISVKADLSHQMREDFELLKNRDVNDYHHAFDAYLAAFIGNYLLKRYPKLESYFVYGDFKKFTQKETKMRRFNFIYDLKHCDQVVNKETGEILWTKDEDIKYIRHLFAYKKILVSHEVREKRGALYNQTIYKAKDDKGSGQESKKLIRIKDDKETKIYGGYSGKSLAYMTIVQITKKNKVSYRVIGIPTLALARLNKLENDSTENNGELYKIIKPQFTHYKVDKKNGEIIETTDDFKIVVSKVRFQQLIDDAGQFFMLASDTYKNNAQQLVISNNALKAINNTNITDCPRDDLERLDNLRLDSAFDEIVKKMDKYFSAYDANNFREKIRNSNLIFYQLPVEDQWENNKITELGKRTVLTRILQGLHANATTTDMSIFKIKTPFGQLRQRSGISLSENAQLIYQSPTGLFERRVQLNKIK

SEQ ID NO: 14 - protein, 1367 aa, Fusobaterium nucleatum
MKKQKFSDYYLGFDIGTNSVGWCVTDLDYNVLRFNKKDMWGSRLFEEAKTAAERRVQRNSRRRLKRRKWRLNLLEEIFSNEILKIDSNFFRRLKESSLWLEDKSSKEKFTLFNDDNYKDYDFYKQYPTIFHLRNELIKNPEKKDIRLVYLAIHSIFKSRGHFLFEGQNLKEIKNFETLYNNLIAFLEDNGINKIIDKNNIEKLEKIVCDSKKGLKDKEKEFKEIFNSDKQLVAIFKLSVGSSVSLNDLFDTDEYKKGEVEKEKISFREQIYEDDKPIYYSILGEKIELLDIAKTFYDFMVLNNILADSQYISEAKVKLYEEHKKDLKNLKYIIRKYNKGNYDKLFKDKNENNYSAYIGLNKEKSKKEVIEKSRLKIDDLIKNIKGYLPKVEEIEEKDKAIFNKILNKIELKTILPKQRISDNGTLPYQIHEAELEKILENQSKYYDFLNYEENGIITKDKLLMTFKFRIPYYVGPLNSYHKDKGGNSWIVRKEEGKILPWNFEQKVDIEKSAEEFIKRMTNKCTYLNGEDVIPKDTFLYSEYVILNELNKVQVNDEFLNEENKRKIIDELFKENKKVSEKKFKEYLLVKQIVDGTIELKGVKDSFNSNYISYIRFKDIFGEKLNLDIYKEISEKSILWKCLYGDDKKIFEKKIKNEYGDILTKDEIKKINTFKFNNWGRLSEKLLTGIEFINLETGECYSSVMDALRRTNYNLMELLSSKFTLQESINNENKEMNEASYRDLIEESYVSPSLKRAIFQTLKIYEEIRKITGRVPKKVFIEMARGGDESMKNKKIPARQEQLKKLYDSCGNDIANFSIDIKEMKNSLISYDNNSLRQKKLYLYYLQFGKCMYTGREIDLDRLLQNNDTYDIDHIYPRSKVIKDDSFDNLVLVLKNENAEKSNEYPVKKEIQEKMKSFWRFLKEKNFISDEKYKRLTGKDDFELRGFMARQLVNVRQTTKEVGKILQQIEPEIKIVYSKAEIASSFREMFDFIKVRELNDTHHAKDAYLNIVAGNVYNTKFTEKPYRYLQEIKENYDVKKIYNYDIKNAWDKENSLEIVKKNMEKNTVNITRFIKEKKGQLFDLNPIKKGETSNEIISIKPKVYNGKDDKLNEKYGYYKSLNPAYFLYVEHKEKNKRIKSFERVNLVDVNNIKDEKSLVKYLIENKKLVEPRVIKKVYKRQVILINDYPYSIVTLDSNKLMDFENLKPLFLENKYEKILKNVIKFLEDNQGKSEENYKFIYLKKKDRYEKNETLESVKDRYNLEFNEMYDKFLEKLDSKDYKNYMNNKKYQELLDVKEKFIKLNLFDKAFTLKSFLDLFNRKTMADFSKVGLTKYLGKIQKISSNVLSKNELYLLEESVTGLFVKKIKL

SEQ ID NO: 15 - protein, 1286 aa, Enterococcus cecorum
RRKQRIQILQELLGEEVLKTDPGFFHRMKESRYVVEDKRTLDGKQVELPYALFVDKDYTDKEYYKQFPTINHLIVYLMTTSDTPDIRLVYLALHYYMKNRGNFLHSGDINNVKDINDILEQLDNVLETFLDGWNLKLKSYVEDIKNIYNRDLGRGERKKAFVNTLGAKTKAEKAFCSLISGGSTNLAELFDDSSLKEIETPKIEFASSSLEDKIDGIQEALEDRFAVIEAAKRLYDWKTLTDILGDSSSLAEARVNSYQMHHEQLLELKSLVKEYLDRKVFQEVFVSLNVANNYPAYIGHTKINGKKKELEVKRTKRNDFYSYVKKQVIEPIKKKVSDEAVLTKLSEIESLIEVDKYLPLQVNSDNGVIPYQVKLNELTRIFDNLENRIPVLRENRDKIIKTFKFRIPYYVGSLNGVVKNGKCTNWMVRKEEGKIYPWNFEDKVDLEASAEQFIRRMTNKCTYLVNEDVLPKYSLLYSKYLVLSELNNLRIDGRPLDVKIKQDIYENVFKKNRKVTLKKIKKYLLKEGIITDDDELSGLADDVKSSLTAYRDFKEKLGHLDLSEAQMENIILNITLFGDDKKLLKKRLAALYPFIDDKSLNRIATLNYRDWGRLSERFLSGITSVDQETGELRTIIQCMYETQANLMQLLAEPYHFVEAIEKENPKVDLESISYRIVNDLYVSPAVKRQIWQTLLVIKDIKQVMKHDPERIFIEMAREKQESKKTKSRKQVLSEVYKKAKEYEHLFEKLNSLTEEQLRSKKIYLYFTQLGKCMYSGEPIDFENLVSANSNYDIDHIYPQSKTIDDSFNNIVLVKKSLNAYKSNHYPIDKNIRDNEKVKTLWNTLVSKGLITKEKYERLIRSTPFSDEELAGFIARQLVETRQSTKAVAEILSNWFPESEIVYSKAKNVSNFRQDFEILKVRELNDCHHAHDAYLNIVVGNAYHTKFTNSPYRFIKNKANQEYNLRKLLQKVNKIESNGVVAWVGQSENNPGTIATVKKVIRRNTVLISRMVKEVDGQLFDLTLMKKGKGQVPIKSSDERLTDISKYGGYNKATGAYFTFVKSKKRGKVVRSFEYVPLHLSKQFENNNELLKEYIEKDRGLTDVEILIPKVLINSLFRYNGSLVRITGRGDTRLLLVHEQPLYVSNSFVQQLKSVSSYKLKKSENDNAKLTKTATEKLSNIDELYDGLLRKLDLPIYSYWFSSIKEYLVESRTKYIKLSIEEKALVIFEILHLFQSDAQVPNLKILGLSTKPSRIRIQKNLKDTDKMSIIHQSPSGIFEHEIELTSL

SEQ ID NO: 16 - protein, 1312 aa, Anaerostipes hadrus
MQNGFLGITVSSEQVGWAVTNPKYELERASRKDLWGVRLFDKAETAEDRRMFRTNRRLNQRKKNRIHYLRDIFHEEVNQKDPNFFQQLDESNFCEDDRTVEFNFDTNLYKNQFPTVYHLRKYLMETKDKPDIRLVYLAFSKFMKNRGHFLYKGNLGEVMDFENSMKGFCESLEKFNIDFPTLSDEQVKEVRDILCDHKIAKTVKKKNIITITKVKSKTAKAWIGLFCGCSVPVKVLFQDIDEEIVTDPEKISFEDASYDDYIANIEKGVGIYYEAIVSAKMLFDWSILNEILGDHQLLSDAMIAEYNKHHDDLKRLQKIIKGTGSRELYQDIFINDVSGNYVCYVGHAKTMSSADQKQFYTFLKNRLKNVNGISSEDAEWIDTEIKNGTLLPKQTKRDNSVIPHQLQLREFELILDNMQEMYPFLKENREKLLKIFNFVIPYYVGPLKGVVRKGESTNWMVPKKDGVIHPWNFDEMVDKEASAECFISRMTGNCSYLFNEKVLPKNSLLYETFEVLNELNPLKINGEPISVELKQRIYEQLFLTGKKVTKKSLTKYLIKNGYDKDIELSGIDNEFHSNLKSHIDFEDYDNLSDEEVEQIILRITVFEDKQLLKDYLNREFVKLSEDERKQICSLSYKGWGNLSEMLLNGITVTDSNGVEVSVMDMLWNTNLNLMQILSKKYGYKAEIEHYNKEHEKTIYNREDLMDYLNIPPAQRRKVNQLITIVKSLKKTYGVPNKIFFKISREHQDDPKRTSSRKEQLKYLYKSLKSEDEKHLMKELDELNDHELSNDKVYLYFLQKGRCIYSGKKLNLSRLRKSNYQNDIDYIYPLSAVNDRSMNNKVLTGIQENRADKYTYFPVDSEIQKKMKGFWMELVLQGFMTKEKYFRLSRENDFSKSELVSFIEREISDNQQSGRMIASVLQYYFPESKIVFVKEKLISSFKRDFHLISSYGHNHLQAAKDAYITIVVGNVYHTKFTMDPAIYFKNHKRKDYDLNRLFLENISRDGQIAWESGPYGSIQTVRKEYAQNHIAVTKRVVEVKGGLFKQMPLKKGHGEYPLKTNDPRFGNIAQYGGYTNVTGSYFVLVESMEKGKKRISLEYVPVYLHERLEDDPGHKLLKEYLVDHRKLNHPKILLAKVRKNSLLKIDGFYYRLNGRSGNALILTNAVELIMDDWQTKTANKISGYMKRRAIDKKARVYQNEFHIQELEQLYDFYLDKLKNGVYKNRKNNQAELIHNEKEQFMELKTEDQCVLLTEIKKLFVCSPMQADLTLIGGSKHTGMIAMSSNVTKADFAVIAEDPLGLRNKVIYSHKGEK

SEQ ID NO: 17 - protein, 1344 aa, Kandleria vitulina
MSQNNNKIYNIGLDIGDASVGWAVVDEHYNLLKRHGKHMWGSRLFTQANTAVERRSSRSTRRRYNKRRERIRLLREIMEDMVLDVDPTFFIRLANVSFLDQEDKKDYLKENYHSNYNLFIDKDFNDKTYYDKYPTIYHLRKHLCESKEKEDPRLIYLALHHIVKYRGNFLYEGQKFSMDVSNIEDKMIDVLRQFNEINLFEYVEDRKKIDEVLNVLKEPLSKKHKAEKAFALFDTTKDNKAAYKELCAALAGNKFNVTKMLKEAELHDEDEKDISFKFSDATFDDAFVEKQPLLGDCVEFIDLLHDIYSWVELQNILGSAHTSEPSISAAMIQRYEDHKNDLKLLKDVIRKYLPKKYFEVFRDEKSKKNNYCNYINHPSKTPVDEFYKYIKKLIEKIDDPDVKTILNKIELESFMLKQNSRTNGAVPYQMQLDELNKILENQSVYYSDLKDNEDKIRSILTFRIPYYFGPLNITKDRQFDWIIKKEGKENERILPWNANEIVDVDKTADEFIKRMRNFCTYFPDEPVMAKNSLTVSKYEVLNEINKLRINDHLIKRDMKDKMLHTLFMDHKSISANAMKKWLVKNQYFSNTDDIKIEGFQKENACSTSLTPWIDFTKIFGKINESNYDFIEKIIYDVTVFEDKKILRRRLKKEYDLDEEKIKKILKLKYSGWSRLSKKLLSGIKTKYKDSTRTPETVLEVMERTNMNLMQVINDEKLGFKKTIDDANSTSVSGKFSYAEVQELAGSPAIKRGIWQALLIVDEIKKIMKHEPAHVYIEFARNEDEKERKDSFVNQMLKLYKDYDFEDETEKEANKHLKGEDAKSKIRSERLKLYYTQMGKCMYTGKSLDIDRLDTYQVDHIVPQSLLKDDSIDNKVLVLSSENQRKLDDLVIPSSIRNKMYGFWEKLFNNKIISPKKFYSLIKTEFNEKDQERFINRQIVETRQITKHVAQIIDNHYENTKVVTVRADLSHQFRERYHIYKNRDINDFHHAHDAYIATILGTYIGHRFESLDAKYIYGEYKRIFRNQKNKGKEMKKNNDGFILNSMRNIYADKDTGEIVWDPNYIDRIKKCFYYKDCFVTKKLEENNGTFFNVTVLPNDTNSDKDNTLATVPVNKYRSNVNKYGGFSGVNSFIVAIKGKKKKGKKVIEVNKLTGIPLMYKNADEEIKINYLKQAEDLEEVQIGKEILKNQLIEKDGGLYYIVAPTEIINAKQLILNESQTKLVCEIYKAMKYKNYDNLDSEKIIDLYRLLINKMELYYPEYRKQLVKKFEDRYEQLKVISIEEKCNIIKQILATLHCNSSIGKIMYSDFKISTTIGRLNGRTISLDDISFIAESPTGMYSKKYKL

SEQ ID NO: 18 - protein, 1288 aa, Enterococcus faecalis
MRLFEEGHTAEDRRLKRTARRRISRRRNRLRYLQAFFEEAMTDLDENFFARLQESFLVPEDKKWHRHPIFAKLEDEVAYHETYPTIYHLRKKLADSSEQADLRLIYLALAHIVKYRGHFLIEGKLSTENTSVKDQFQQFMVIYNQTFVNGESRLVSAPLPESVLIEEELTEKASRTKKSEKVLQQFPQEKANGLFGQFLKLMVGNKADFKKVFGLEEEAKITYASESYEEDLEGILAKVGDEYSDVFLAAKNVYDAVELSTILADSDKKSHAKLSSSMIVRFTEHQEDLKKFKRFIRENCPDEYDNLFKNEQKDGYAGYIAHAGKVSQLKFYQYVKKIIQDIAGAEYFLEKIAQENFLRKQRTFDNGVIPHQIHLAELQAIIHRQAAYYPFLKENQEKIEQLVTFRIPYYVGPLSKGDASTFAWLKRQSEEPIRPWNLQETVDLDQSATAFIERMTNFDTYLPSEKVLPKHSLLYEKFMVFNELTKISYTDDRGIKANFSGKEKEKIFDYLFKTRRKVKKKDIIQFYRNEYNTEIVTLSGLEEDQFNASFSTYQDLLKCGLTRAELDHPDNAEKLEDIIKILTIFEDRQRIRTQLSTFKGQFSAEVLKKLERKHYTGWGRLSKKLINGIYDKESGKTILDYLVKDDGVSKHYNRNFMQLINDSQLSFKNAIQKAQSSEHEETLSETVNELAGSPAIKKGIYQSLKIVDELVAIMGYAPKRIVVEMARENQTTSTGKRRSIQRLKIVEKAMAEIGSNLLKEQPTTNEQLRDTRLFLYYMQNGKDMYTGDELSLHRLSHYDIDHIIPQSFMKDDSLDNLVLVGSTENRGKSDDVPSKEVVKDMKAYWEKLYAAGLISQRKFQRLTKGEQGGLTLEDKAHFIQRQLVETRQITKNVAGILDQRYNAKSKEKKVQIITLKASLTSQFRSIFGLYKVREVNDYHHGQDAYLNCVVATTLLKVYPNLAPEFVYGEYPKFQTFKENKATAKAIIYTNLLRFFTEDEPRFTKDGEILWSNSYLKTIKKELNYHQMNIVKKVEVQKGGFSKESIKPKGPSNKLIPVKNGLDPQKYGGFDSPVVAYTVLFTHEKGKKPLIKQEILGITIMEKTRFEQNPILFLEEKGFLRPRVLMKLPKYTLYEFPEGRRRLLASAKEAQKGNQMVLPEHLLTLLYHAKQCLLPNQSESLAYVEQHQPEFQEILERVVDFAEVHTLAKSKVQQIVKLFEANQTADVKEIAASFIQLMQFNAMGAPSTFKFFQKDIERARYTSIKEIFDATIIYQSPTGLYETRRKVVD

SEQ ID NO: 19 - protein, 1052 aa, Staphylococcus aureus
KRNYILGLDIGITSVGYGIIDYETRDVIDAGVRLFKEANVENNEGRRSKRGARRLKRRRRHRIQRVKKLLFDYNLLTDHSELSGINPYEARVKGLSQKLSEEEFSAALLHLAKRRGVHNVNEVEEDTGNELSTKEQISRNSKALEEKYVAELQLERLKKDGEVRGSINRFKTSDYVKEAKQLLKVQKAYHQLDQSFIDTYIDLLETRRTYYEGPGEGSPFGWKDIKEWYEMLMGHCTYFPEELRSVKYAYNADLYNALNDLNNLVITRDENEKLEYYEKFQIIENVFKQKKKPTLKQIAKEILVNEEDIKGYRVTSTGKPEFTNLKVYHDIKDITARKEIIENAELLDQIAKILTIYQSSEDIQEELTNLNSELTQEEIEQISNLKGYTGTHNLSLKAINLILDELWHTNDNQIAIFNRLKLVPKKVDLSQQKEIPTTLVDDFILSPVVKRSFIQSIKVINAIIKKYGLPNDIIIELAREKNSKDAQKMINEMQKRNRQTNERIEEIIRTTGKENAKYLIEKIKLHDMQEGKCLYSLEAIPLEDLLNNPFNYEVDHIIPRSVSFDNSFNNKVLVKQEENSKKGNRTPFQYLSSSDSKISYETFKKHILNLAKGKGRISKTKKEYLLEERDINRFSVQKDFINRNLVDTRYATRGLMNLLRSYFRVNNLDVKVKSINGGFTSFLRRKWKFKKERNKGYKHHAEDALIIANADFIFKEWKKLDKAKKVMENQMFEEKQAESMPEIETEQEYKEIFITPHQIKHIKDFKDYKYSHRVDKKPNRELINDTLYSTRKDDKGNTLIVNNLNGLYDKDNDKLKKLINKSPEKLLMYHHDPQTYQKLKLIMEQYGDEKNPLYKYYEETGNYLTKYSKKDNGPVIKKIKYYGNKLNAHLDITDDYPNSRNKVVKLSLKPYRFDVYLDNGVYKFVTVKNLDVIKKENYYEVNSKCYEEAKKLKKISNQAEFIASFYNNDLIKINGELYRVIGVNNDLLNRIEVNMIDITYREYLENMNDKRPPRIIKTIASKTQSIKKYSTDILGNLYEVKSKKHPQIIKKG

SEQ ID NO: 20 - protein, 1082 aa, Bacillus thermodenitrificans
MKYKIGLDIGITSIGWAVINLDIPRIEDLGVRIFDRAENPKTGESLALPRRLARSARRRLRRRKHRLERIRRLFVREGILTKEELNKLFEKKHEIDVWQLRVEALDRKLNNDELARILLHLAKRRGFRSNRKSERTNKENSTMLKHIEENQSILSSYRTVAEMVVKDPKFSLHKRNKEDNYTNTVARDDLEREIKLIFAKQREYGNIVCTEAFEHEYISIWASQRPFASKDDIEKKVGFCTFEPKEKRAPKATYTFQSFTVWEHINKLRLVSPGGIRALTDDERRLIYKQAFHKNKITFHDVRTLLNLPDDTRFKGLLYDRNTTLKENEKVRFLELGAYHKIRKAIDSVYGKGAAKSFRPIDFDTFGYALTMFKDDTDIRSYLRNEYEQNGKRMENLADKVYDEELIEELLNLSFSKFGHLSLKALRNILPYMEQGEVYSTACERAGYTFTGPKKKQKTVLLPNIPPIANPVVMRALTQARKVVNAIIKKYGSPVSIHIELARELSQSFDERRKMQKEQEGNRKKNETAIRQLVEYGLTLNPTGLDIVKFKLWSEQNGKCAYSLQPIEIERLLEPGYTEVDHVIPYSRSLDDSYTNKVLVLTKENREKGNRTPAEYLGLGSERWQQFETFVLTNKQFSKKKRDRLLRLHYDENEENEFKNRNLNDTRYISRFLANFIREHLKFADSDDKQKVYTVNGRITAHLRSRWNFNKNREESNLHHAVDAAIVACTTPSDIARVTAFYQRREQNKELSKKTDPQFPQPWPHFADELQARLSKNPKESIKALNLGNYDNEKLESLQPVFVSRMPKRSITGAAHQETLRRYIGIDERSGKIQTVVKKKLSEIQLDKTGHFPMYGKESDPRTYEAIRQRLLEHNNDPKKAFQEPLYKPKKNGELGPIIRTIKIIDTTNQVIPLNDGKTVAYNSNIVRVDVFEKDGKYYCVPIYTIDMMKGILPNKAIEPNKPYSEWKEMTEDYTFRFSLYPNDLIRIEFPREKTIKTAVGEEIKIKDLFAYYQTIDSSNGGLSLVSHDNNFSLRSIGSRTLKRFEKYQVDVLGNIYKVRGEKRVGVASSSHSKAGETIRPL

SEQ ID NO: 21 - protein, 1375 aa, Streptococcus canis
MEKKYSIGLDIGTNSVGWAVITDDYKVPSKKFKVLGNTNRKSIKKNLMGALLFDSGETAEATRLKRTARRRYTRRKNRIRYLQEIFANEMAKLDDSFFQRLEESFLVEEDKKNERHPIFGNLADEVAYHRNYPTIYHLRKKLADSPEKADLRLIYLALAHIIKFRGHFLIEGKLNAENSDVAKLFYQLIQTYNQLFEESPLDEIEVDAKGILSARLSKSKRLEKLIAVFPNEKKNGLFGNIIALALGLTPNFKSNFDLTEDAKLQLSKDTYDDDLDELLGQIGDQYADLFSAAKNLSDAILLSDILRSNSEVTKAPLSASMVKRYDEHHQDLALLKTLVRQQFPEKYAEIFKDDTKNGYAGYVGIGIKHRKRTTKLATQEEFYKFIKPILEKMDGAEELLAKLNRDDLLRKQRTFDNGSIPHQIHLKELHAILRRQEEFYPFLKENREKIEKILTFRIPYYVGPLARGNSRFAWLTRKSEEAITPWNFEEVVDKGASAQSFIERMTNFDEQLPNKKVLPKHSLLYEYFTVYNELTKVKYVTERMRKPEFLSGEQKKAIVDLLFKTNRKVTVKQLKEDYFKKIECFDSVEIIGVEDRFNASLGTYHDLLKIIKDKDFLDNEENEDILEDIVLTLTLFEDREMIEERLKTYAHLFDDKVMKQLKRRHYTGWGRLSRKMINGIRDKQSGKTILDFLKSDGFSNRNFMQLIHDDSLTFKEEIEKAQVSGQGDSLHEQIADLAGSPAIKKGILQTVKIVDELVKVMGHKPENIVIEMARENQTTTKGLQQSRERKKRIEEGIKELESQILKENPVENTQLQNEKLYLYYLQNGRDMYVDQELDINRLSDYDVDHIVPQSFIKDDSIDNKVLTRSVENRGKSDNVPSEEVVKKMKNYWRQLLNAKLITQRKFDNLTKAERGGLSEADKAGFIKRQLVETRQITKHVARILDSRMNTKRDKNDKPIREVKVITLKSKLVSDFRKDFQLYKVRDINNYHHAHDAYLNAVVGTALIKKYPKLESEFVYGDYKVYDVRKMIAKSEQEIGKATAKRFFYSNIMNFFKTEVKLANGEIRKRPLIETNGETGEVVWNKEKDFATVRKVLAMPQVNIVKKTEVQTGGFSKESILSKRESAKLIPRKKGWDTRKYGGFGSPTVAYSILVVAKVEKGKAKKLKSVKVLVGITIMEKGSYEKDPIGFLEAKGYKDIKKELIFKLPKYSLFELENGRRRMLASATELQKANELVLPQHLVRLLYYTQNISATTGSNNLGYIEQHREEFKEIFEKIIDFSEKYILKNKVNSNLKSSFDEQFAVSDSILLSNSFVSLLKYTSFGASGGFTFLDLDVKQGRLRYQTVTEVLDATLIYQSITGLYETRTDLSQLGGD

SEQ ID NO: 22 - protein, 1368 aa, Streptococcus pyogenes
  misc_feature (10)..(10): Xaa can be any naturally occurring amino acid
  misc_feature (840)..(840): Xaa can be any naturally occurring amino acid
MDKKYSIGLXIGTNSVGWAVITDEYKVPSKKFKVLGNTDRHSIKKNLIGALLFDSGETAEATRLKRTARRRYTRRKNRICYLQEIFSNEMAKVDDSFFHRLEESFLVEEDKKHERHPIFGNIVDEVAYHEKYPTIYHLRKKLVDSTDKADLRLIYLALAHMIKFRGHFLIEGDLNPDNSDVDKLFIQLVQTYNQLFEENPINASGVDAKAILSARLSKSRRLENLIAQLPGEKKNGLFGNLIALSLGLTPNFKSNFDLAEDAKLQLSKDTYDDDLDNLLAQIGDQYADLFLAAKNLSDAILLSDILRVNTEITKAPLSASMIKRYDEHHQDLTLLKALVRQQLPEKYKEIFFDQSKNGYAGYIDGGASQEEFYKFIKPILEKMDGTEELLVKLNREDLLRKQRTFDNGSIPHQIHLGELHAILRRQEDFYPFLKDNREKIEKILTFRIPYYVGPLARGNSRFAWMTRKSEETITPWNFEEVVDKGASAQSFIERMTNFDKNLPNEKVLPKHSLLYEYFTVYNELTKVKYVTEGMRKPAFLSGEQKKAIVDLLFKTNRKVTVKQLKEDYFKKIECFDSVEISGVEDRFNASLGTYHDLLKIIKDKDFLDNEENEDILEDIVLTLTLFEDREMIEERLKTYAHLFDDKVMKQLKRRRYTGWGRLSRKLINGIRDKQSGKTILDFLKSDGFANRNFMQLIHDDSLTFKEDIQKAQVSGQGDSLHEHIANLAGSPAIKKGILQTVKVVDELVKVMGRHKPENIVIEMARENQTTQKGQKNSRERMKRIEEGIKELGSQILKEHPVENTQLQNEKLYLYYLQNGRDMYVDQELDINRLSDYDVDXIVPQSFLKDDSIDNKVLTRSDKNRGKSDNVPSEEVVKKMKNYWRQLLNAKLITQRKFDNLTKAERGGLSELDKAGFIKRQLVETRQITKHVAQILDSRMNTKYDENDKLIREVKVITLKSKLVSDFRKDFQFYKVREINNYHHAHDAYLNAVVGTALIKKYPKLESEFVYGDYKVYDVRKMIAKSEQEIGKATAKYFFYSNIMNFFKTEITLANGEIRKRPLIETNGETGEIVWDKGRDFATVRKVLSMPQVNIVKKTEVQTGGFSKESILPKRNSDKLIARKKDWDPKKYGGFDSPTVAYSVLVVAKVEKGKSKKLKSVKELLGITIMERSSFEKNPIDFLEAKGYKEVKKDLIIKLPKYSLFELENGRKRMLASAGELQKGNELALPSKYVNFLYLASHYEKLKGSPEDNEQKQLFVEQHKHYLDEIIEQISEFSKRVILADANLDKVLSAYNKHRDKPIREQAENIIHLFTLTNLGAPAAFKYFDTTIDRKRYTSTKEVLDATLIHQSITGLYETRIDLSQLGGD

SEQ ID NO: 23 - protein, 1368 aa, Streptococcus pyogenes
MDKKYSIGLAIGTNSVGWAVITDEYKVPSKKFKVLGNTDRHSIKKNLIGALLFDSGETAEATRLKRTARRRYTRRKNRICYLQEIFSNEMAKVDDSFFHRLEESFLVEEDKKHERHPIFGNIVDEVAYHEKYPTIYHLRKKLVDSTDKADLRLIYLALAHMIKFRGHFLIEGDLNPDNSDVDKLFIQLVQTYNQLFEENPINASGVDAKAILSARLSKSRRLENLIAQLPGEKKNGLFGNLIALSLGLTPNFKSNFDLAEDAKLQLSKDTYDDDLDNLLAQIGDQYADLFLAAKNLSDAILLSDILRVNTEITKAPLSASMIKRYDEHHQDLTLLKALVRQQLPEKYKEIFFDQSKNGYAGYIDGGASQEEFYKFIKPILEKMDGTEELLVKLNREDLLRKQRTFDNGSIPHQIHLGELHAILRRQEDFYPFLKDNREKIEKILTFRIPYYVGPLARGNSRFAWMTRKSEETITPWNFEEVVDKGASAQSFIERMTNFDKNLPNEKVLPKHSLLYEYFTVYNELTKVKYVTEGMRKPAFLSGEQKKAIVDLLFKTNRKVTVKQLKEDYFKKIECFDSVEISGVEDRFNASLGTYHDLLKIIKDKDFLDNEENEDILEDIVLTLTLFEDREMIEERLKTYAHLFDDKVMKQLKRRRYTGWGRLSRKLINGIRDKQSGKTILDFLKSDGFANRNFMQLIHDDSLTFKEDIQKAQVSGQGDSLHEHIANLAGSPAIKKGILQTVKVVDELVKVMGRHKPENIVIEMARENQTTQKGQKNSRERMKRIEEGIKELGSQILKEHPVENTQLQNEKLYLYYLQNGRDMYVDQELDINRLSDYDVDAIVPQSFLKDDSIDNKVLTRSDKNRGKSDNVPSEEVVKKMKNYWRQLLNAKLITQRKFDNLTKAERGGLSELDKAGFIKRQLVETRQITKHVAQILDSRMNTKYDENDKLIREVKVITLKSKLVSDFRKDFQFYKVREINNYHHAHDAYLNAVVGTALIKKYPKLESEFVYGDYKVYDVRKMIAKSEQEIGKATAKYFFYSNIMNFFKTEITLANGEIRKRPLIETNGETGEIVWDKGRDFATVRKVLSMPQVNIVKKTEVQTGGFSKESILPKRNSDKLIARKKDWDPKKYGGFDSPTVAYSVLVVAKVEKGKSKKLKSVKELLGITIMERSSFEKNPIDFLEAKGYKEVKKDLIIKLPKYSLFELENGRKRMLASAGELQKGNELALPSKYVNFLYLASHYEKLKGSPEDNEQKQLFVEQHKHYLDEIIEQISEFSKRVILADANLDKVLSAYNKHRDKPIREQAENIIHLFTLTNLGAPAAFKYFDTTIDRKRYTSTKEVLDATLIHQSITGLYETRIDLSQLGGD

SEQ ID NO: 24 - protein, 1368 aa, Streptococcus pyogenes
  misc_feature (10)..(10): Xaa can be any naturally occurring amino acid
MDKKYSIGLXIGTNSVGWAVITDEYKVPSKKFKVLGNTDRHSIKKNLIGALLFDSGETAEATRLKRTARRRYTRRKNRICYLQEIFSNEMAKVDDSFFHRLEESFLVEEDKKHERHPIFGNIVDEVAYHEKYPTIYHLRKKLVDSTDKADLRLIYLALAHMIKFRGHFLIEGDLNPDNSDVDKLFIQLVQTYNQLFEENPINASGVDAKAILSARLSKSRRLENLIAQLPGEKKNGLFGNLIALSLGLTPNFKSNFDLAEDAKLQLSKDTYDDDLDNLLAQIGDQYADLFLAAKNLSDAILLSDILRVNTEITKAPLSASMIKRYDEHHQDLTLLKALVRQQLPEKYKEIFFDQSKNGYAGYIDGGASQEEFYKFIKPILEKMDGTEELLVKLNREDLLRKQRTFDNGSIPHQIHLGELHAILRRQEDFYPFLKDNREKIEKILTFRIPYYVGPLARGNSRFAWMTRKSEETITPWNFEEVVDKGASAQSFIERMTNFDKNLPNEKVLPKHSLLYEYFTVYNELTKVKYVTEGMRKPAFLSGEQKKAIVDLLFKTNRKVTVKQLKEDYFKKIECFDSVEISGVEDRFNASLGTYHDLLKIIKDKDFLDNEENEDILEDIVLTLTLFEDREMIEERLKTYAHLFDDKVMKQLKRRRYTGWGRLSRKLINGIRDKQSGKTILDFLKSDGFANRNFMQLIHDDSLTFKEDIQKAQVSGQGDSLHEHIANLAGSPAIKKGILQTVKVVDELVKVMGRHKPENIVIEMARENQTTQKGQKNSRERMKRIEEGIKELGSQILKEHPVENTQLQNEKLYLYYLQNGRDMYVDQELDINRLSDYDVDHIVPQSFLKDDSIDNKVLTRSDKNRGKSDNVPSEEVVKKMKNYWRQLLNAKLITQRKFDNLTKAERGGLSELDKAGFIKRQLVETRQITKHVAQILDSRMNTKYDENDKLIREVKVITLKSKLVSDFRKDFQFYKVREINNYHHAHDAYLNAVVGTALIKKYPKLESEFVYGDYKVYDVRKMIAKSEQEIGKATAKYFFYSNIMNFFKTEITLANGEIRKRPLIETNGETGEIVWDKGRDFATVRKVLSMPQVNIVKKTEVQTGGFSKESILPKRNSDKLIARKKDWDPKKYGGFDSPTVAYSVLVVAKVEKGKSKKLKSVKELLGITIMERSSFEKNPIDFLEAKGYKEVKKDLIIKLPKYSLFELENGRKRMLASAGELQKGNELALPSKYVNFLYLASHYEKLKGSPEDNEQKQLFVEQHKHYLDEIIEQISEFSKRVILADANLDKVLSAYNKHRDKPIREQAENIIHLFTLTNLGAPAAFKYFDTTIDRKRYTSTKEVLDATLIHQSITGLYETRIDLSQLGGD

SEQ ID NO: 25 - protein, 1368 aa, Streptococcus pyogenes
  misc_feature (762)..(762): Xaa can be any naturally occurring amino acid
MDKKYSIGLDIGTNSVGWAVITDEYKVPSKKFKVLGNTDRHSIKKNLIGALLFDSGETAEATRLKRTARRRYTRRKNRICYLQEIFSNEMAKVDDSFFHRLEESFLVEEDKKHERHPIFGNIVDEVAYHEKYPTIYHLRKKLVDSTDKADLRLIYLALAHMIKFRGHFLIEGDLNPDNSDVDKLFIQLVQTYNQLFEENPINASGVDAKAILSARLSKSRRLENLIAQLPGEKKNGLFGNLIALSLGLTPNFKSNFDLAEDAKLQLSKDTYDDDLDNLLAQIGDQYADLFLAAKNLSDAILLSDILRVNTEITKAPLSASMIKRYDEHHQDLTLLKALVRQQLPEKYKEIFFDQSKNGYAGYIDGGASQEEFYKFIKPILEKMDGTEELLVKLNREDLLRKQRTFDNGSIPHQIHLGELHAILRRQEDFYPFLKDNREKIEKILTFRIPYYVGPLARGNSRFAWMTRKSEETITPWNFEEVVDKGASAQSFIERMTNFDKNLPNEKVLPKHSLLYEYFTVYNELTKVKYVTEGMRKPAFLSGEQKKAIVDLLFKTNRKVTVKQLKEDYFKKIECFDSVEISGVEDRFNASLGTYHDLLKIIKDKDFLDNEENEDILEDIVLTLTLFEDREMIEERLKTYAHLFDDKVMKQLKRRRYTGWGRLSRKLINGIRDKQSGKTILDFLKSDGFANRNFMQLIHDDSLTFKEDIQKAQVSGQGDSLHEHIANLAGSPAIKKGILQTVKVVDELVKVMGRHKPENIVIXMARENQTTQKGQKNSRERMKRIEEGIKELGSQILKEHPVENTQLQNEKLYLYYLQNGRDMYVDQELDINRLSDYDVDHIVPQSFLKDDSIDNKVLTRSDKNRGKSDNVPSEEVVKKMKNYWRQLLNAKLITQRKFDNLTKAERGGLSELDKAGFIKRQLVETRQITKHVAQILDSRMNTKYDENDKLIREVKVITLKSKLVSDFRKDFQFYKVREINNYHHAHDAYLNAVVGTALIKKYPKLESEFVYGDYKVYDVRKMIAKSEQEIGKATAKYFFYSNIMNFFKTEITLANGEIRKRPLIETNGETGEIVWDKGRDFATVRKVLSMPQVNIVKKTEVQTGGFSKESILPKRNSDKLIARKKDWDPKKYGGFDSPTVAYSVLVVAKVEKGKSKKLKSVKELLGITIMERSSFEKNPIDFLEAKGYKEVKKDLIIKLPKYSLFELENGRKRMLASAGELQKGNELALPSKYVNFLYLASHYEKLKGSPEDNEQKQLFVEQHKHYLDEIIEQISEFSKRVILADANLDKVLSAYNKHRDKPIREQAENIIHLFTLTNLGAPAAFKYFDTTIDRKRYTSTKEVLDATLIHQSITGLYETRIDLSQLGGD

SEQ ID NO: 26 - protein, 1368 aa, Streptococcus pyogenes
  misc_feature (983)..(983): Xaa can be any naturally occurring amino acid
MDKKYSIGLDIGTNSVGWAVITDEYKVPSKKFKVLGNTDRHSIKKNLIGALLFDSGETAEATRLKRTARRRYTRRKNRICYLQEIFSNEMAKVDDSFFHRLEESFLVEEDKKHERHPIFGNIVDEVAYHEKYPTIYHLRKKLVDSTDKADLRLIYLALAHMIKFRGHFLIEGDLNPDNSDVDKLFIQLVQTYNQLFEENPINASGVDAKAILSARLSKSRRLENLIAQLPGEKKNGLFGNLIALSLGLTPNFKSNFDLAEDAKLQLSKDTYDDDLDNLLAQIGDQYADLFLAAKNLSDAILLSDILRVNTEITKAPLSASMIKRYDEHHQDLTLLKALVRQQLPEKYKEIFFDQSKNGYAGYIDGGASQEEFYKFIKPILEKMDGTEELLVKLNREDLLRKQRTFDNGSIPHQIHLGELHAILRRQEDFYPFLKDNREKIEKILTFRIPYYVGPLARGNSRFAWMTRKSEETITPWNFEEVVDKGASAQSFIERMTNFDKNLPNEKVLPKHSLLYEYFTVYNELTKVKYVTEGMRKPAFLSGEQKKAIVDLLFKTNRKVTVKQLKEDYFKKIECFDSVEISGVEDRFNASLGTYHDLLKIIKDKDFLDNEENEDILEDIVLTLTLFEDREMIEERLKTYAHLFDDKVMKQLKRRRYTGWGRLSRKLINGIRDKQSGKTILDFLKSDGFANRNFMQLIHDDSLTFKEDIQKAQVSGQGDSLHEHIANLAGSPAIKKGILQTVKVVDELVKVMGRHKPENIVIEMARENQTTQKGQKNSRERMKRIEEGIKELGSQILKEHPVENTQLQNEKLYLYYLQNGRDMYVDQELDINRLSDYDVDHIVPQSFLKDDSIDNKVLTRSDKNRGKSDNVPSEEVVKKMKNYWRQLLNAKLITQRKFDNLTKAERGGLSELDKAGFIKRQLVETRQITKHVAQILDSRMNTKYDENDKLIREVKVITLKSKLVSDFRKDFQFYKVREINNYHXAHDAYLNAVVGTALIKKYPKLESEFVYGDYKVYDVRKMIAKSEQEIGKATAKYFFYSNIMNFFKTEITLANGEIRKRPLIETNGETGEIVWDKGRDFATVRKVLSMPQVNIVKKTEVQTGGFSKESILPKRNSDKLIARKKDWDPKKYGGFDSPTVAYSVLVVAKVEKGKSKKLKSVKELLGITIMERSSFEKNPIDFLEAKGYKEVKKDLIIKLPKYSLFELENGRKRMLASAGELQKGNELALPSKYVNFLYLASHYEKLKGSPEDNEQKQLFVEQHKHYLDEIIEQISEFSKRVILADANLDKVLSAYNKHRDKPIREQAENIIHLFTLTNLGAPAAFKYFDTTIDRKRYTSTKEVLDATLIHQSITGLYETRIDLSQLGGD

SEQ ID NO: 27 - protein, 1368 aa, Streptococcus pyogenes
  misc_feature (986)..(986): Xaa can be any naturally occurring amino acid
MDKKYSIGLDIGTNSVGWAVITDEYKVPSKKFKVLGNTDRHSIKKNLIGALLFDSGETAEATRLKRTARRRYTRRKNRICYLQEIFSNEMAKVDDSFFHRLEESFLVEEDKKHERHPIFGNIVDEVAYHEKYPTIYHLRKKLVDSTDKADLRLIYLALAHMIKFRGHFLIEGDLNPDNSDVDKLFIQLVQTYNQLFEENPINASGVDAKAILSARLSKSRRLENLIAQLPGEKKNGLFGNLIALSLGLTPNFKSNFDLAEDAKLQLSKDTYDDDLDNLLAQIGDQYADLFLAAKNLSDAILLSDILRVNTEITKAPLSASMIKRYDEHHQDLTLLKALVRQQLPEKYKEIFFDQSKNGYAGYIDGGASQEEFYKFIKPILEKMDGTEELLVKLNREDLLRKQRTFDNGSIPHQIHLGELHAILRRQEDFYPFLKDNREKIEKILTFRIPYYVGPLARGNSRFAWMTRKSEETITPWNFEEVVDKGASAQSFIERMTNFDKNLPNEKVLPKHSLLYEYFTVYNELTKVKYVTEGMRKPAFLSGEQKKAIVDLLFKTNRKVTVKQLKEDYFKKIECFDSVEISGVEDRFNASLGTYHDLLKIIKDKDFLDNEENEDILEDIVLTLTLFEDREMIEERLKTYAHLFDDKVMKQLKRRRYTGWGRLSRKLINGIRDKQSGKTILDFLKSDGFANRNFMQLIHDDSLTFKEDIQKAQVSGQGDSLHEHIANLAGSPAIKKGILQTVKVVDELVKVMGRHKPENIVIEMARENQTTQKGQKNSRERMKRIEEGIKELGSQILKEHPVENTQLQNEKLYLYYLQNGRDMYVDQELDINRLSDYDVDHIVPQSFLKDDSIDNKVLTRSDKNRGKSDNVPSEEVVKKMKNYWRQLLNAKLITQRKFDNLTKAERGGLSELDKAGFIKRQLVETRQITKHVAQILDSRMNTKYDENDKLIREVKVITLKSKLVSDFRKDFQFYKVREINNYHHAHXAYLNAVVGTALIKKYPKLESEFVYGDYKVYDVRKMIAKSEQEIGKATAKYFFYSNIMNFFKTEITLANGEIRKRPLIETNGETGEIVWDKGRDFATVRKVLSMPQVNIVKKTEVQTGGFSKESILPKRNSDKLIARKKDWDPKKYGGFDSPTVAYSVLVVAKVEKGKSKKLKSVKELLGITIMERSSFEKNPIDFLEAKGYKEVKKDLIIKLPKYSLFELENGRKRMLASAGELQKGNELALPSKYVNFLYLASHYEKLKGSPEDNEQKQLFVEQHKHYLDEIIEQISEFSKRVILADANLDKVLSAYNKHRDKPIREQAENIIHLFTLTNLGAPAAFKYFDTTIDRKRYTSTKEVLDATLIHQSITGLYETRIDLSQLGGD

SEQ ID NO: 28 - protein, 1368 aa, Streptococcus pyogenes
MDKKYSIGLAIGTNSVGWAVITDEYKVPSKKFKVLGNTDRHSIKKNLIGALLFDSGETAEATRLKRTARRRYTRRKNRICYLQEIFSNEMAKVDDSFFHRLEESFLVEEDKKHERHPIFGNIVDEVAYHEKYPTIYHLRKKLVDSTDKADLRLIYLALAHMIKFRGHFLIEGDLNPDNSDVDKLFIQLVQTYNQLFEENPINASGVDAKAILSARLSKSRRLENLIAQLPGEKKNGLFGNLIALSLGLTPNFKSNFDLAEDAKLQLSKDTYDDDLDNLLAQIGDQYADLFLAAKNLSDAILLSDILRVNTEITKAPLSASMIKRYDEHHQDLTLLKALVRQQLPEKYKEIFFDQSKNGYAGYIDGGASQEEFYKFIKPILEKMDGTEELLVKLNREDLLRKQRTFDNGSIPHQIHLGELHAILRRQEDFYPFLKDNREKIEKILTFRIPYYVGPLARGNSRFAWMTRKSEETITPWNFEEVVDKGASAQSFIERMTNFDKNLPNEKVLPKHSLLYEYFTVYNELTKVKYVTEGMRKPAFLSGEQKKAIVDLLFKTNRKVTVKQLKEDYFKKIECFDSVEISGVEDRFNASLGTYHDLLKIIKDKDFLDNEENEDILEDIVLTLTLFEDREMIEERLKTYAHLFDDKVMKQLKRRRYTGWGRLSRKLINGIRDKQSGKTILDFLKSDGFANRNFMQLIHDDSLTFKEDIQKAQVSGQGDSLHEHIANLAGSPAIKKGILQTVKVVDELVKVMGRHKPENIVIEMARENQTTQKGQKNSRERMKRIEEGIKELGSQILKEHPVENTQLQNEKLYLYYLQNGRDMYVDQELDINRLSDYDVDHIVPQSFLKDDSIDNKVLTRSDKNRGKSDNVPSEEVVKKMKNYWRQLLNAKLITQRKFDNLTKAERGGLSELDKAGFIKRQLVETRQITKHVAQILDSRMNTKYDENDKLIREVKVITLKSKLVSDFRKDFQFYKVREINNYHHAHDAYLNAVVGTALIKKYPKLESEFVYGDYKVYDVRKMIAKSEQEIGKATAKYFFYSNIMNFFKTEITLANGEIRKRPLIETNGETGEIVWDKGRDFATVRKVLSMPQVNIVKKTEVQTGGFSKESILPKRNSDKLIARKKDWDPKKYGGFDSPTVAYSVLVVAKVEKGKSKKLKSVKELLGITIMERSSFEKNPIDFLEAKGYKEVKKDLIIKLPKYSLFELENGRKRMLASAGELQKGNELALPSKYVNFLYLASHYEKLKGSPEDNEQKQLFVEQHKHYLDEIIEQISEFSKRVILADANLDKVLSAYNKHRDKPIREQAENIIHLFTLTNLGAPAAFKYFDTTIDRKRYTSTKEVLDATLIHQSITGLYETRIDLSQLGGD

SEQ ID NO: 29 - protein, 1368 aa, Streptococcus pyogenes
MDKKYSIGLDIGTNSVGWAVITDEYKVPSKKFKVLGNTDRHSIKKNLIGALLFDSGETAEATRLKRTARRRYTRRKNRICYLQEIFSNEMAKVDDSFFHRLEESFLVEEDKKHERHPIFGNIVDEVAYHEKYPTIYHLRKKLVDSTDKADLRLIYLALAHMIKFRGHFLIEGDLNPDNSDVDKLFIQLVQTYNQLFEENPINASGVDAKAILSARLSKSRRLENLIAQLPGEKKNGLFGNLIALSLGLTPNFKSNFDLAEDAKLQLSKDTYDDDLDNLLAQIGDQYADLFLAAKNLSDAILLSDILRVNTEITKAPLSASMIKRYDEHHQDLTLLKALVRQQLPEKYKEIFFDQSKNGYAGYIDGGASQEEFYKFIKPILEKMDGTEELLVKLNREDLLRKQRTFDNGSIPHQIHLGELHAILRRQEDFYPFLKDNREKIEKILTFRIPYYVGPLARGNSRFAWMTRKSEETITPWNFEEVVDKGASAQSFIERMTNFDKNLPNEKVLPKHSLLYEYFTVYNELTKVKYVTEGMRKPAFLSGEQKKAIVDLLFKTNRKVTVKQLKEDYFKKIECFDSVEISGVEDRFNASLGTYHDLLKIIKDKDFLDNEENEDILEDIVLTLTLFEDREMIEERLKTYAHLFDDKVMKQLKRRRYTGWGRLSRKLINGIRDKQSGKTILDFLKSDGFANRNFMQLIHDDSLTFKEDIQKAQVSGQGDSLHEHIANLAGSPAIKKGILQTVKVVDELVKVMGRHKPENIVIAMARENQTTQKGQKNSRERMKRIEEGIKELGSQILKEHPVENTQLQNEKLYLYYLQNGRDMYVDQELDINRLSDYDVDHIVPQSFLKDDSIDNKVLTRSDKNRGKSDNVPSEEVVKKMKNYWRQLLNAKLITQRKFDNLTKAERGGLSELDKAGFIKRQLVETRQITKHVAQILDSRMNTKYDENDKLIREVKVITLKSKLVSDFRKDFQFYKVREINNYHHAHDAYLNAVVGTALIKKYPKLESEFVYGDYKVYDVRKMIAKSEQEIGKATAKYFFYSNIMNFFKTEITLANGEIRKRPLIETNGETGEIVWDKGRDFATVRKVLSMPQVNIVKKTEVQTGGFSKESILPKRNSDKLIARKKDWDPKKYGGFDSPTVAYSVLVVAKVEKGKSKKLKSVKELLGITIMERSSFEKNPIDFLEAKGYKEVKKDLIIKLPKYSLFELENGRKRMLASAGELQKGNELALPSKYVNFLYLASHYEKLKGSPEDNEQKQLFVEQHKHYLDEIIEQISEFSKRVILADANLDKVLSAYNKHRDKPIREQAENIIHLFTLTNLGAPAAFKYFDTTIDRKRYTSTKEVLDATLIHQSITGLYETRIDLSQLGGD

SEQ ID NO: 30 - protein, 1368 aa, Streptococcus pyogenes
MDKKYSIGLDIGTNSVGWAVITDEYKVPSKKFKVLGNTDRHSIKKNLIGALLFDSGETAEATRLKRTARRRYTRRKNRICYLQEIFSNEMAKVDDSFFHRLEESFLVEEDKKHERHPIFGNIVDEVAYHEKYPTIYHLRKKLVDSTDKADLRLIYLALAHMIKFRGHFLIEGDLNPDNSDVDKLFIQLVQTYNQLFEENPINASGVDAKAILSARLSKSRRLENLIAQLPGEKKNGLFGNLIALSLGLTPNFKSNFDLAEDAKLQLSKDTYDDDLDNLLAQIGDQYADLFLAAKNLSDAILLSDILRVNTEITKAPLSASMIKRYDEHHQDLTLLKALVRQQLPEKYKEIFFDQSKNGYAGYIDGGASQEEFYKFIKPILEKMDGTEELLVKLNREDLLRKQRTFDNGSIPHQIHLGELHAILRRQEDFYPFLKDNREKIEKILTFRIPYYVGPLARGNSRFAWMTRKSEETITPWNFEEVVDKGASAQSFIERMTNFDKNLPNEKVLPKHSLLYEYFTVYNELTKVKYVTEGMRKPAFLSGEQKKAIVDLLFKTNRKVTVKQLKEDYFKKIECFDSVEISGVEDRFNASLGTYHDLLKIIKDKDFLDNEENEDILEDIVLTLTLFEDREMIEERLKTYAHLFDDKVMKQLKRRRYTGWGRLSRKLINGIRDKQSGKTILDFLKSDGFANRNFMQLIHDDSLTFKEDIQKAQVSGQGDSLHEHIANLAGSPAIKKGILQTVKVVDELVKVMGRHKPENIVIEMARENQTTQKGQKNSRERMKRIEEGIKELGSQILKEHPVENTQLQNEKLYLYYLQNGRDMYVDQELDINRLSDYDVDHIVPQSFLKDDSIDNKVLTRSDKNRGKSDNVPSEEVVKKMKNYWRQLLNAKLITQRKFDNLTKAERGGLSELDKAGFIKRQLVETRQITKHVAQILDSRMNTKYDENDKLIREVKVITLKSKLVSDFRKDFQFYKVREINNYHAAHDAYLNAVVGTALIKKYPKLESEFVYGDYKVYDVRKMIAKSEQEIGKATAKYFFYSNIMNFFKTEITLANGEIRKRPLIETNGETGEIVWDKGRDFATVRKVLSMPQVNIVKKTEVQTGGFSKESILPKRNSDKLIARKKDWDPKKYGGFDSPTVAYSVLVVAKVEKGKSKKLKSVKELLGITIMERSSFEKNPIDFLEAKGYKEVKKDLIIKLPKYSLFELENGRKRMLASAGELQKGNELALPSKYVNFLYLASHYEKLKGSPEDNEQKQLFVEQHKHYLDEIIEQISEFSKRVILADANLDKVLSAYNKHRDKPIREQAENIIHLFTLTNLGAPAAFKYFDTTIDRKRYTSTKEVLDATLIHQSITGLYETRIDLSQLGGD

SEQ ID NO: 31 - protein, 1368 aa, Streptococcus pyogenes
MDKKYSIGLDIGTNSVGWAVITDEYKVPSKKFKVLGNTDRHSIKKNLIGALLFDSGETAEATRLKRTARRRYTRRKNRICYLQEIFSNEMAKVDDSFFHRLEESFLVEEDKKHERHPIFGNIVDEVAYHEKYPTIYHLRKKLVDSTDKADLRLIYLALAHMIKFRGHFLIEGDLNPDNSDVDKLFIQLVQTYNQLFEENPINASGVDAKAILSARLSKSRRLENLIAQLPGEKKNGLFGNLIALSLGLTPNFKSNFDLAEDAKLQLSKDTYDDDLDNLLAQIGDQYADLFLAAKNLSDAILLSDILRVNTEITKAPLSASMIKRYDEHHQDLTLLKALVRQQLPEKYKEIFFDQSKNGYAGYIDGGASQEEFYKFIKPILEKMDGTEELLVKLNREDLLRKQRTFDNGSIPHQIHLGELHAILRRQEDFYPFLKDNREKIEKILTFRIPYYVGPLARGNSRFAWMTRKSEETITPWNFEEVVDKGASAQSFIERMTNFDKNLPNEKVLPKHSLLYEYFTVYNELTKVKYVTEGMRKPAFLSGEQKKAIVDLLFKTNRKVTVKQLKEDYFKKIECFDSVEISGVEDRFNASLGTYHDLLKIIKDKDFLDNEENEDILEDIVLTLTLFEDREMIEERLKTYAHLFDDKVMKQLKRRRYTGWGRLSRKLINGIRDKQSGKTILDFLKSDGFANRNFMQLIHDDSLTFKEDIQKAQVSGQGDSLHEHIANLAGSPAIKKGILQTVKVVDELVKVMGRHKPENIVIEMARENQTTQKGQKNSRERMKRIEEGIKELGSQILKEHPVENTQLQNEKLYLYYLQNGRDMYVDQELDINRLSDYDVDHIVPQSFLKDDSIDNKVLTRSDKNRGKSDNVPSEEVVKKMKNYWRQLLNAKLITQRKFDNLTKAERGGLSELDKAGFIKRQLVETRQITKHVAQILDSRMNTKYDENDKLIREVKVITLKSKLVSDFRKDFQFYKVREINNYHHAHAAYLNAVVGTALIKKYPKLESEFVYGDYKVYDVRKMIAKSEQEIGKATAKYFFYSNIMNFFKTEITLANGEIRKRPLIETNGETGEIVWDKGRDFATVRKVLSMPQVNIVKKTEVQTGGFSKESILPKRNSDKLIARKKDWDPKKYGGFDSPTVAYSVLVVAKVEKGKSKKLKSVKELLGITIMERSSFEKNPIDFLEAKGYKEVKKDLIIKLPKYSLFELENGRKRMLASAGELQKGNELALPSKYVNFLYLASHYEKLKGSPEDNEQKQLFVEQHKHYLDEIIEQISEFSKRVILADANLDKVLSAYNKHRDKPIREQAENIIHLFTLTNLGAPAAFKYFDTTIDRKRYTSTKEVLDATLIHQSITGLYETRIDLSQLGGD

SEQ ID NO: 32 - protein, 1368 aa, Streptococcus pyogenes
  misc_feature (840)..(840): Xaa can be any naturally occurring amino acid
MDKKYSIGLDIGTNSVGWAVITDEYKVPSKKFKVLGNTDRHSIKKNLIGALLFDSGETAEATRLKRTARRRYTRRKNRICYLQEIFSNEMAKVDDSFFHRLEESFLVEEDKKHERHPIFGNIVDEVAYHEKYPTIYHLRKKLVDSTDKADLRLIYLALAHMIKFRGHFLIEGDLNPDNSDVDKLFIQLVQTYNQLFEENPINASGVDAKAILSARLSKSRRLENLIAQLPGEKKNGLFGNLIALSLGLTPNFKSNFDLAEDAKLQLSKDTYDDDLDNLLAQIGDQYADLFLAAKNLSDAILLSDILRVNTEITKAPLSASMIKRYDEHHQDLTLLKALVRQQLPEKYKEIFFDQSKNGYAGYIDGGASQEEFYKFIKPILEKMDGTEELLVKLNREDLLRKQRTFDNGSIPHQIHLGELHAILRRQEDFYPFLKDNREKIEKILTFRIPYYVGPLARGNSRFAWMTRKSEETITPWNFEEVVDKGASAQSFIERMTNFDKNLPNEKVLPKHSLLYEYFTVYNELTKVKYVTEGMRKPAFLSGEQKKAIVDLLFKTNRKVTVKQLKEDYFKKIECFDSVEISGVEDRFNASLGTYHDLLKIIKDKDFLDNEENEDILEDIVLTLTLFEDREMIEERLKTYAHLFDDKVMKQLKRRRYTGWGRLSRKLINGIRDKQSGKTILDFLKSDGFANRNFMQLIHDDSLTFKEDIQKAQVSGQGDSLHEHIANLAGSPAIKKGILQTVKVVDELVKVMGRHKPENIVIEMARENQTTQKGQKNSRERMKRIEEGIKELGSQILKEHPVENTQLQNEKLYLYYLQNGRDMYVDQELDINRLSDYDVDXIVPQSFLKDDSIDNKVLTRSDKNRGKSDNVPSEEVVKKMKNYWRQLLNAKLITQRKFDNLTKAERGGLSELDKAGFIKRQLVETRQITKHVAQILDSRMNTKYDENDKLIREVKVITLKSKLVSDFRKDFQFYKVREINNYHHAHDAYLNAVVGTALIKKYPKLESEFVYGDYKVYDVRKMIAKSEQEIGKATAKYFFYSNIMNFFKTEITLANGEIRKRPLIETNGETGEIVWDKGRDFATVRKVLSMPQVNIVKKTEVQTGGFSKESILPKRNSDKLIARKKDWDPKKYGGFDSPTVAYSVLVVAKVEKGKSKKLKSVKELLGITIMERSSFEKNPIDFLEAKGYKEVKKDLIIKLPKYSLFELENGRKRMLASAGELQKGNELALPSKYVNFLYLASHYEKLKGSPEDNEQKQLFVEQHKHYLDEIIEQISEFSKRVILADANLDKVLSAYNKHRDKPIREQAENIIHLFTLTNLGAPAAFKYFDTTIDRKRYTSTKEVLDATLIHQSITGLYETRIDLSQLGGD

SEQ ID NO: 33 - protein, 1368 aa, Streptococcus pyogenes
MDKKYSIGLDIGTNSVGWAVITDEYKVPSKKFKVLGNTDRHSIKKNLIGALLFDSGETAEATRLKRTARRRYTRRKNRICYLQEIFSNEMAKVDDSFFHRLEESFLVEEDKKHERHPIFGNIVDEVAYHEKYPTIYHLRKKLVDSTDKADLRLIYLALAHMIKFRGHFLIEGDLNPDNSDVDKLFIQLVQTYNQLFEENPINASGVDAKAILSARLSKSRRLENLIAQLPGEKKNGLFGNLIALSLGLTPNFKSNFDLAEDAKLQLSKDTYDDDLDNLLAQIGDQYADLFLAAKNLSDAILLSDILRVNTEITKAPLSASMIKRYDEHHQDLTLLKALVRQQLPEKYKEIFFDQSKNGYAGYIDGGASQEEFYKFIKPILEKMDGTEELLVKLNREDLLRKQRTFDNGSIPHQIHLGELHAILRRQEDFYPFLKDNREKIEKILTFRIPYYVGPLARGNSRFAWMTRKSEETITPWNFEEVVDKGASAQSFIERMTNFDKNLPNEKVLPKHSLLYEYFTVYNELTKVKYVTEGMRKPAFLSGEQKKAIVDLLFKTNRKVTVKQLKEDYFKKIECFDSVEISGVEDRFNASLGTYHDLLKIIKDKDFLDNEENEDILEDIVLTLTLFEDREMIEERLKTYAHLFDDKVMKQLKRRRYTGWGRLSRKLINGIRDKQSGKTILDFLKSDGFANRNFMQLIHDDSLTFKEDIQKAQVSGQGDSLHEHIANLAGSPAIKKGILQTVKVVDELVKVMGRHKPENIVIEMARENQTTQKGQKNSRERMKRIEEGIKELGSQILKEHPVENTQLQNEKLYLYYLQNGRDMYVDQELDINRLSDYDVDAIVPQSFLKDDSIDNKVLTRSDKNRGKSDNVPSEEVVKKMKNYWRQLLNAKLITQRKFDNLTKAERGGLSELDKAGFIKRQLVETRQITKHVAQILDSRMNTKYDENDKLIREVKVITLKSKLVSDFRKDFQFYKVREINNYHHAHDAYLNAVVGTALIKKYPKLESEFVYGDYKVYDVRKMIAKSEQEIGKATAKYFFYSNIMNFFKTEITLANGEIRKRPLIETNGETGEIVWDKGRDFATVRKVLSMPQVNIVKKTEVQTGGFSKESILPKRNSDKLIARKKDWDPKKYGGFDSPTVAYSVLVVAKVEKGKSKKLKSVKELLGITIMERSSFEKNPIDFLEAKGYKEVKKDLIIKLPKYSLFELENGRKRMLASAGELQKGNELALPSKYVNFLYLASHYEKLKGSPEDNEQKQLFVEQHKHYLDEIIEQISEFSKRVILADANLDKVLSAYNKHRDKPIREQAENIIHLFTLTNLGAPAAFKYFDTTIDRKRYTSTKEVLDATLIHQSITGLYETRIDLSQLGGD

SEQ ID NO: 34 - protein, 1368 aa, Streptococcus pyogenes
  misc_feature (864)..(864): Xaa can be any naturally occurring amino acid
MDKKYSIGLDIGTNSVGWAVITDEYKVPSKKFKVLGNTDRHSIKKNLIGALLFDSGETAEATRLKRTARRRYTRRKNRICYLQEIFSNEMAKVDDSFFHRLEESFLVEEDKKHERHPIFGNIVDEVAYHEKYPTIYHLRKKLVDSTDKADLRLIYLALAHMIKFRGHFLIEGDLNPDNSDVDKLFIQLVQTYNQLFEENPINASGVDAKAILSARLSKSRRLENLIAQLPGEKKNGLFGNLIALSLGLTPNFKSNFDLAEDAKLQLSKDTYDDDLDNLLAQIGDQYADLFLAAKNLSDAILLSDILRVNTEITKAPLSASMIKRYDEHHQDLTLLKALVRQQLPEKYKEIFFDQSKNGYAGYIDGGASQEEFYKFIKPILEKMDGTEELLVKLNREDLLRKQRTFDNGSIPHQIHLGELHAILRRQEDFYPFLKDNREKIEKILTFRIPYYVGPLARGNSRFAWMTRKSEETITPWNFEEVVDKGASAQSFIERMTNFDKNLPNEKVLPKHSLLYEYFTVYNELTKVKYVTEGMRKPAFLSGEQKKAIVDLLFKTNRKVTVKQLKEDYFKKIECFDSVEISGVEDRFNASLGTYHDLLKIIKDKDFLDNEENEDILEDIVLTLTLFEDREMIEERLKTYAHLFDDKVMKQLKRRRYTGWGRLSRKLINGIRDKQSGKTILDFLKSDGFANRNFMQLIHDDSLTFKEDIQKAQVSGQGDSLHEHIANLAGSPAIKKGILQTVKVVDELVKVMGRHKPENIVIEMARENQTTQKGQKNSRERMKRIEEGIKELGSQILKEHPVENTQLQNEKLYLYYLQNGRDMYVDQELDINRLSDYDVDHIVPQSFLKDDSIDNKVLTRSDKNXGKSDNVPSEEVVKKMKNYWRQLLNAKLITQRKFDNLTKAERGGLSELDKAGFIKRQLVETRQITKHVAQILDSRMNTKYDENDKLIREVKVITLKSKLVSDFRKDFQFYKVREINNYHHAHDAYLNAVVGTALIKKYPKLESEFVYGDYKVYDVRKMIAKSEQEIGKATAKYFFYSNIMNFFKTEITLANGEIRKRPLIETNGETGEIVWDKGRDFATVRKVLSMPQVNIVKKTEVQTGGFSKESILPKRNSDKLIARKKDWDPKKYGGFDSPTVAYSVLVVAKVEKGKSKKLKSVKELLGITIMERSSFEKNPIDFLEAKGYKEVKKDLIIKLPKYSLFELENGRKRMLASAGELQKGNELALPSKYVNFLYLASHYEKLKGSPEDNEQKQLFVEQHKHYLDEIIEQISEFSKRVILADANLDKVLSAYNKHRDKPIREQAENIIHLFTLTNLGAPAAFKYFDTTIDRKRYTSTKEVLDATLIHQSITGLYETRIDLSQLGGD

SEQ ID NO: 35 - protein, 1368 aa, Streptococcus pyogenes
MDKKYSIGLDIGTNSVGWAVITDEYKVPSKKFKVLGNTDRHSIKKNLIGALLFDSGETAEATRLKRTARRRYTRRKNRICYLQEIFSNEMAKVDDSFFHRLEESFLVEEDKKHERHPIFGNIVDEVAYHEKYPTIYHLRKKLVDSTDKADLRLIYLALAHMIKFRGHFLIEGDLNPDNSDVDKLFIQLVQTYNQLFEENPINASGVDAKAILSARLSKSRRLENLIAQLPGEKKNGLFGNLIALSLGLTPNFKSNFDLAEDAKLQLSKDTYDDDLDNLLAQIGDQYADLFLAAKNLSDAILLSDILRVNTEITKAPLSASMIKRYDEHHQDLTLLKALVRQQLPEKYKEIFFDQSKNGYAGYIDGGASQEEFYKFIKPILEKMDGTEELLVKLNREDLLRKQRTFDNGSIPHQIHLGELHAILRRQEDFYPFLKDNREKIEKILTFRIPYYVGPLARGNSRFAWMTRKSEETITPWNFEEVVDKGASAQSFIERMTNFDKNLPNEKVLPKHSLLYEYFTVYNELTKVKYVTEGMRKPAFLSGEQKKAIVDLLFKTNRKVTVKQLKEDYFKKIECFDSVEISGVEDRFNASLGTYHDLLKIIKDKDFLDNEENEDILEDIVLTLTLFEDREMIEERLKTYAHLFDDKVMKQLKRRRYTGWGRLSRKLINGIRDKQSGKTILDFLKSDGFANRNFMQLIHDDSLTFKEDIQKAQVSGQGDSLHEHIANLAGSPAIKKGILQTVKVVDELVKVMGRHKPENIVIEMARENQTTQKGQKNSRERMKRIEEGIKELGSQILKEHPVENTQLQNEKLYLYYLQNGRDMYVDQELDINRLSDYDVDHIVPQSFLKDDSIDNKVLTRSDKNAGKSDNVPSEEVVKKMKNYWRQLLNAKLITQRKFDNLTKAERGGLSELDKAGFIKRQLVETRQITKHVAQILDSRMNTKYDENDKLIREVKVITLKSKLVSDFRKDFQFYKVREINNYHHAHDAYLNAVVGTALIKKYPKLESEFVYGDYKVYDVRKMIAKSEQEIGKATAKYFFYSNIMNFFKTEITLANGEIRKRPLIETNGETGEIVWDKGRDFATVRKVLSMPQVNIVKKTEVQTGGFSKESILPKRNSDKLIARKKDWDPKKYGGFDSPTVAYSVLVVAKVEKGKSKKLKSVKELLGITIMERSSFEKNPIDFLEAKGYKEVKKDLIIKLPKYSLFELENGRKRMLASAGELQKGNELALPSKYVNFLYLASHYEKLKGSPEDNEQKQLFVEQHKHYLDEIIEQISEFSKRVILADANLDKVLSAYNKHRDKPIREQAENIIHLFTLTNLGAPAAFKYFDTTIDRKRYTSTKEVLDATLIHQSITGLYETRIDLSQLGGD

SEQ ID NO: 36 - protein, 1367 aa, Streptococcus pyogenes
  misc_feature (839)..(839): Xaa can be any naturally occurring amino acid
DKKYSIGLDIGTNSVGWAVITDEYKVPSKKFKVLGNTDRHSIKKNLIGALLFDSGETAEATRLKRTARRRYTRRKNRICYLQEIFSNEMAKVDDSFFHRLEESFLVEEDKKHERHPIFGNIVDEVAYHEKYPTIYHLRKKLVDSTDKADLRLIYLALAHMIKFRGHFLIEGDLNPDNSDVDKLFIQLVQTYNQLFEENPINASGVDAKAILSARLSKSRRLENLIAQLPGEKKNGLFGNLIALSLGLTPNFKSNFDLAEDAKLQLSKDTYDDDLDNLLAQIGDQYADLFLAAKNLSDAILLSDILRVNTEITKAPLSASMIKRYDEHHQDLTLLKALVRQQLPEKYKEIFFDQSKNGYAGYIDGGASQEEFYKFIKPILEKMDGTEELLVKLNREDLLRKQRTFDNGSIPHQIHLGELHAILRRQEDFYPFLKDNREKIEKILTFRIPYYVGPLARGNSRFAWMTRKSEETITPWNFEEVVDKGASAQSFIERMTNFDKNLPNEKVLPKHSLLYEYFTVYNELTKVKYVTEGMRKPAFLSGEQKKAIVDLLFKTNRKVTVKQLKEDYFKKIECFDSVEISGVEDRFNASLGTYHDLLKIIKDKDFLDNEENEDILEDIVLTLTLFEDREMIEERLKTYAHLFDDKVMKQLKRRRYTGWGRLSRKLINGIRDKQSGKTILDFLKSDGFANRNFMQLIHDDSLTFKEDIQKAQVSGQGDSLHEHIANLAGSPAIKKGILQTVKVVDELVKVMGRHKPENIVIEMARENQTTQKGQKNSRERMKRIEEGIKELGSQILKEHPVENTQLQNEKLYLYYLQNGRDMYVDQELDINRLSDYDVDXIVPQSFLKDDSIDNKVLTRSDKNRGKSDNVPSEEVVKKMKNYWRQLLNAKLITQRKFDNLTKAERGGLSELDKAGFIKRQLVETRQITKHVAQILDSRMNTKYDENDKLIREVKVITLKSKLVSDFRKDFQFYKVREINNYHHAHDAYLNAVVGTALIKKYPKLESEFVYGDYKVYDVRKMIAKSEQEIGKATAKYFFYSNIMNFFKTEITLANGEIRKRPLIETNGETGEIVWDKGRDFATVRKVLSMPQVNIVKKTEVQTGGFSKESILPKRNSDKLIARKKDWDPKKYGGFDSPTVAYSVLVVAKVEKGKSKKLKSVKELLGITIMERSSFEKNPIDFLEAKGYKEVKKDLIIKLPKYSLFELENGRKRMLASAGELQKGNELALPSKYVNFLYLASHYEKLKGSPEDNEQKQLFVEQHKHYLDEIIEQISEFSKRVILADANLDKVLSAYNKHRDKPIREQAENIIHLFTLTNLGAPAAFKYFDTTIDRKRYTSTKEVLDATLIHQSITGLYETRIDLSQLGGD

SEQ ID NO: 37 - protein, 1367 aa, Streptococcus pyogenes
DKKYSIGLDIGTNSVGWAVITDEYKVPSKKFKVLGNTDRHSIKKNLIGALLFDSGETAEATRLKRTARRRYTRRKNRICYLQEIFSNEMAKVDDSFFHRLEESFLVEEDKKHERHPIFGNIVDEVAYHEKYPTIYHLRKKLVDSTDKADLRLIYLALAHMIKFRGHFLIEGDLNPDNSDVDKLFIQLVQTYNQLFEENPINASGVDAKAILSARLSKSRRLENLIAQLPGEKKNGLFGNLIALSLGLTPNFKSNFDLAEDAKLQLSKDTYDDDLDNLLAQIGDQYADLFLAAKNLSDAILLSDILRVNTEITKAPLSASMIKRYDEHHQDLTLLKALVRQQLPEKYKEIFFDQSKNGYAGYIDGGASQEEFYKFIKPILEKMDGTEELLVKLNREDLLRKQRTFDNGSIPHQIHLGELHAILRRQEDFYPFLKDNREKIEKILTFRIPYYVGPLARGNSRFAWMTRKSEETITPWNFEEVVDKGASAQSFIERMTNFDKNLPNEKVLPKHSLLYEYFTVYNELTKVKYVTEGMRKPAFLSGEQKKAIVDLLFKTNRKVTVKQLKEDYFKKIECFDSVEISGVEDRFNASLGTYHDLLKIIKDKDFLDNEENEDILEDIVLTLTLFEDREMIEERLKTYAHLFDDKVMKQLKRRRYTGWGRLSRKLINGIRDKQSGKTILDFLKSDGFANRNFMQLIHDDSLTFKEDIQKAQVSGQGDSLHEHIANLAGSPAIKKGILQTVKVVDELVKVMGRHKPENIVIEMARENQTTQKGQKNSRERMKRIEEGIKELGSQILKEHPVENTQLQNEKLYLYYLQNGRDMYVDQELDINRLSDYDVDAIVPQSFLKDDSIDNKVLTRSDKNRGKSDNVPSEEVVKKMKNYWRQLLNAKLITQRKFDNLTKAERGGLSELDKAGFIKRQLVETRQITKHVAQILDSRMNTKYDENDKLIREVKVITLKSKLVSDFRKDFQFYKVREINNYHHAHDAYLNAVVGTALIKKYPKLESEFVYGDYKVYDVRKMIAKSEQEIGKATAKYFFYSNIMNFFKTEITLANGEIRKRPLIETNGETGEIVWDKGRDFATVRKVLSMPQVNIVKKTEVQTGGFSKESILPKRNSDKLIARKKDWDPKKYGGFDSPTVAYSVLVVAKVEKGKSKKLKSVKELLGITIMERSSFEKNPIDFLEAKGYKEVKKDLIIKLPKYSLFELENGRKRMLASAGELQKGNELALPSKYVNFLYLASHYEKLKGSPEDNEQKQLFVEQHKHYLDEIIEQISEFSKRVILADANLDKVLSAYNKHRDKPIREQAENIIHLFTLTNLGAPAAFKYFDTTIDRKRYTSTKEVLDATLIHQSITGLYETRIDLSQLGGD

SEQ ID NO: 38 - protein, 1367 aa, Streptococcus pyogenes
  misc_feature (863)..(863): Xaa can be any naturally occurring amino acid
DKKYSIGLDIGTNSVGWAVITDEYKVPSKKFKVLGNTDRHSIKKNLIGALLFDSGETAEATRLKRTARRRYTRRKNRICYLQEIFSNEMAKVDDSFFHRLEESFLVEEDKKHERHPIFGNIVDEVAYHEKYPTIYHLRKKLVDSTDKADLRLIYLALAHMIKFRGHFLIEGDLNPDNSDVDKLFIQLVQTYNQLFEENPINASGVDAKAILSARLSKSRRLENLIAQLPGEKKNGLFGNLIALSLGLTPNFKSNFDLAEDAKLQLSKDTYDDDLDNLLAQIGDQYADLFLAAKNLSDAILLSDILRVNTEITKAPLSASMIKRYDEHHQDLTLLKALVRQQLPEKYKEIFFDQSKNGYAGYIDGGASQEEFYKFIKPILEKMDGTEELLVKLNREDLLRKQRTFDNGSIPHQIHLGELHAILRRQEDFYPFLKDNREKIEKILTFRIPYYVGPLARGNSRFAWMTRKSEETITPWNFEEVVDKGASAQSFIERMTNFDKNLPNEKVLPKHSLLYEYFTVYNELTKVKYVTEGMRKPAFLSGEQKKAIVDLLFKTNRKVTVKQLKEDYFKKIECFDSVEISGVEDRFNASLGTYHDLLKIIKDKDFLDNEENEDILEDIVLTLTLFEDREMIEERLKTYAHLFDDKVMKQLKRRRYTGWGRLSRKLINGIRDKQSGKTILDFLKSDGFANRNFMQLIHDDSLTFKEDIQKAQVSGQGDSLHEHIANLAGSPAIKKGILQTVKVVDELVKVMGRHKPENIVIEMARENQTTQKGQKNSRERMKRIEEGIKELGSQILKEHPVENTQLQNEKLYLYYLQNGRDMYVDQELDINRLSDYDVDHIVPQSFLKDDSIDNKVLTRSDKNXGKSDNVPSEEVVKKMKNYWRQLLNAKLITQRKFDNLTKAERGGLSELDKAGFIKRQLVETRQITKHVAQILDSRMNTKYDENDKLIREVKVITLKSKLVSDFRKDFQFYKVREINNYHHAHDAYLNAVVGTALIKKYPKLESEFVYGDYKVYDVRKMIAKSEQEIGKATAKYFFYSNIMNFFKTEITLANGEIRKRPLIETNGETGEIVWDKGRDFATVRKVLSMPQVNIVKKTEVQTGGFSKESILPKRNSDKLIARKKDWDPKKYGGFDSPTVAYSVLVVAKVEKGKSKKLKSVKELLGITIMERSSFEKNPIDFLEAKGYKEVKKDLIIKLPKYSLFELENGRKRMLASAGELQKGNELALPSKYVNFLYLASHYEKLKGSPEDNEQKQLFVEQHKHYLDEIIEQISEFSKRVILADANLDKVLSAYNKHRDKPIREQAENIIHLFTLTNLGAPAAFKYFDTTIDRKRYTSTKEVLDATLIHQSITGLYETRIDLSQLGGD

SEQ ID NO: 39 - protein, 1367 aa, Streptococcus pyogenes
DKKYSIGLDIGTNSVGWAVITDEYKVPSKKFKVLGNTDRHSIKKNLIGALLFDSGETAEATRLKRTARRRYTRRKNRICYLQEIFSNEMAKVDDSFFHRLEESFLVEEDKKHERHPIFGNIVDEVAYHEKYPTIYHLRKKLVDSTDKADLRLIYLALAHMIKFRGHFLIEGDLNPDNSDVDKLFIQLVQTYNQLFEENPINASGVDAKAILSARLSKSRRLENLIAQLPGEKKNGLFGNLIALSLGLTPNFKSNFDLAEDAKLQLSKDTYDDDLDNLLAQIGDQYADLFLAAKNLSDAILLSDILRVNTEITKAPLSASMIKRYDEHHQDLTLLKALVRQQLPEKYKEIFFDQSKNGYAGYIDGGASQEEFYKFIKPILEKMDGTEELLVKLNREDLLRKQRTFDNGSIPHQIHLGELHAILRRQEDFYPFLKDNREKIEKILTFRIPYYVGPLARGNSRFAWMTRKSEETITPWNFEEVVDKGASAQSFIERMTNFDKNLPNEKVLPKHSLLYEYFTVYNELTKVKYVTEGMRKPAFLSGEQKKAIVDLLFKTNRKVTVKQLKEDYFKKIECFDSVEISGVEDRFNASLGTYHDLLKIIKDKDFLDNEENEDILEDIVLTLTLFEDREMIEERLKTYAHLFDDKVMKQLKRRRYTGWGRLSRKLINGIRDKQSGKTILDFLKSDGFANRNFMQLIHDDSLTFKEDIQKAQVSGQGDSLHEHIANLAGSPAIKKGILQTVKVVDELVKVMGRHKPENIVIEMARENQTTQKGQKNSRERMKRIEEGIKELGSQILKEHPVENTQLQNEKLYLYYLQNGRDMYVDQELDINRLSDYDVDHIVPQSFLKDDSIDNKVLTRSDKNAGKSDNVPSEEVVKKMKNYWRQLLNAKLITQRKFDNLTKAERGGLSELDKAGFIKRQLVETRQITKHVAQILDSRMNTKYDENDKLIREVKVITLKSKLVSDFRKDFQFYKVREINNYHHAHDAYLNAVVGTALIKKYPKLESEFVYGDYKVYDVRKMIAKSEQEIGKATAKYFFYSNIMNFFKTEITLANGEIRKRPLIETNGETGEIVWDKGRDFATVRKVLSMPQVNIVKKTEVQTGGFSKESILPKRNSDKLIARKKDWDPKKYGGFDSPTVAYSVLVVAKVEKGKSKKLKSVKELLGITIMERSSFEKNPIDFLEAKGYKEVKKDLIIKLPKYSLFELENGRKRMLASAGELQKGNELALPSKYVNFLYLASHYEKLKGSPEDNEQKQLFVEQHKHYLDEIIEQISEFSKRVILADANLDKVLSAYNKHRDKPIREQAENIIHLFTLTNLGAPAAFKYFDTTIDRKRYTSTKEVLDATLIHQSITGLYETRIDLSQLGGD

SEQ ID NO: 40 - protein, 1082 aa, Neisseria meningitidis
MAAFKPNSINYILGLDIGIASVGWAMVEIDEEENPIRLIDLGVRVFERAEVPKTGDSLAMARRLARSVRRLTRRRAHRLLRTRRLLKREGVLQAANFDENGLIKSLPNTPWQLRAAALDRKLTPLEWSAVLLHLIKHRGYLSQRKNEGETADKELGALLKGVAGNAHALQTGDFRTPAELALNKFEKESGHIRNQRSDYSHTFSRKDLQAELILLFEKQKEFGNPHVSGGLKEGIETLLMTQRPALSGDAVQKMLGHCTFEPAEPKAAKNTYTAERFIWLTKLNNLRILEQGSERPLTDTERATLMDEPYRKSKLTYAQARKLLGLEDTAFFKGLRYGKDNAEASTLMEMKAYHAISRALEKEGLKDKKSPLNLSPELQDEIGTAFSLFKTDEDITGRLKDRIQPEILEALLKHISFDKFVQISLKALRRIVPLMEQGKRYDEACAEIYGDHYGKKNTEEKIYLPPIPADEIRNPVVLRALSQARKVINGVVRRYGSPARIHIETAREVGKSFKDRKEIEKRQEENRKDREKAAAKFREYFPNFVGEPKSKDILKLRLYEQQHGKCLYSGKEINLGRLNEKGYVEIDAALPFSRTWDDSFNNKVLVLGSENQNKGNQTPYEYFNGKDNSREWQEFKARVETSRFPRSKKQRILLQKFDEDGFKERNLNDTRYVNRFLCQFVADRMRLTGKGKKRVFASNGQITNLLRGFWGLRKVRAENDRHHALDAVVVACSTVAMQQKITRFVRYKEMNAFDGKTIDKETGEVLHQKTHFPQPWEFFAQEVMIRVFGKPDGKPEFEEADTLEKLRTLLAEKLSSRPEAVHEYVTPLFVSRAPNRKMSGQGHMETVKSAKRLDEGVSVLRVPLTQLKLKDLEKMVNREREPKLYEALKARLEAHKDDPAKAFAEPFYKYDKAGNRTQQVKAVRVEQVQKTGVWVRNHNGIADNATMVRVDVFEKGDKYYLVPIYSWQVAKGILPDRAVVQGKDEEDWQLIDDSFNFKFSLHPNDLVEVITKKARMFGYFASCHRGTGNINIRIHDLDHKIGKNGILEGIGVKTALSFQKYQIDELGKEIRPCRLKKRPPVR

SEQ ID NO: 41 - protein, 984 aa, Campylobacter jejuni
MARILAFDIGISSIGWAFSENDELKDCGVRIFTKVENPKTGESLALPRRLARSARKRLARRKARLNHLKHLIANEFKLNYEDYQSFDESLAKAYKGSLISPYELRFRALNELLSKQDFARVILHIAKRRGYDDIKNSDDKEKGAILKAIKQNEEKLANYQSVGEYLYKEYFQKFKENSKEFTNVRNKKESYERCIAQSFLKDELKLIFKKQREFGFSFSKKFEEEVLSVAFYKRALKDFSHLVGNCSFFTDEKRAPKNSPLAFMFVALTRIINLLNNLKNTEGILYTKDDLNALLNEVLKNGTLTYKQTKKLLGLSDDYEFKGEKGTYFIEFKKYKEFIKALGEHNLSQDDLNEIAKDITLIKDEIKLKKALAKYDLNQNQIDSLSKLEFKDHLNISFKALKLVTPLMLEGKKYDEACNELNLKVAINEDKKDFLPAFNETYYKDEVTNPVVLRAIKEYRKVLNALLKKYGKVHKINIELAREVGKNHSQRAKIEKEQNENYKAKKDAELECEKLGLKINSKNILKLRLFKEQKEFCAYSGEKIKISDLQDEKMLEIDHIYPYSRSFDDSYMNKVLVFTKQNQEKLNQTPFEAFGNDSAKWQKIEVLAKNLPTKKQKRILDKNYKDKEQKNFKDRNLNDTRYIARLVLNYTKDYLDFLPLSDDENTKLNDTQKGSKVHVEAKSGMLTSALRHTWGFSAKDRNNHLHHAIDAVIIAYANNSIVKAFSDFKKEQESNSAELYAKKISELDYKNKRKFFEPFSGFRQKVLDKIDEIFVSKPERKKPSGALHEETFRKEEEFYQSYGGKEGVLKALELGKIRKVNGKIVKNGDMFRVDIFKHKKTNKFYAVPIYTMDFALKVLPNKAVARSKKGEIKDWILMDENYEFCFSLYKDSLILIQTKDMQEPEFVYYNAFTSSTVSLIVSKHDNKFETLSKNQKILFKNANEKEVIAKSIGIQNLKVFEKYIVSALGEVTKAEFRQREDFKK

SEQ ID NO: 42 - protein, 1087 aa, Bacillus stearothermophilus
MRYKIGLDIGITSVGWAVMNLDIPRIEDLGVRIFDRAENPQTGESLALPRRLARSARRRLRRRKHRLERIRRLVIREGILTKEELDKLFEEKHEIDVWQLRVEALDRKLNNDELARVLLHLAKRRGFKSNRKSERSNKENSTMLKHIEENRAILSSYRTVGEMIVKDPKFALHKRNKGENYTNTIARDDLEREIRLIFSKQREFGNMSCTEEFENEYITIWASQRPVASKDDIEKKVGFCTFEPKEKRAPKATYTFQSFIAWEHINKLRLISPSGARGLTDEERRLLYEQAFQKNKITYHDIRTLLHLPDDTYFKGIVYDRGESRKQNENIRFLELDAYHQIRKAVDKVYGKGKSSSFLPIDFDTFGYALTLFKDDADIHSYLRNEYEQNGKRMPNLANKVYDNELIEELLNLSFTKFGHLSLKALRSILPYMEQGEVYSSACERAGYTFTGPKKKQKTMLLPNIPPIANPVVMRALTQARKVVNAIIKKYGSPVSIHIELARDLSQTFDERRKTKKEQDENRKKNETAIRQLMEYGLTLNPTGHDIVKFKLWSEQNGRCAYSLQPIEIERLLEPGYVEVDHVIPYSRSLDDSYTNKVLVLTRENREKGNRIPAEYLGVGTERWQQFETFVLTNKQFSKKKRDRLLRLHYDENEETEFKNRNLNDTRYISRFFANFIREHLKFAESDDKQKVYTVNGRVTAHLRSRWEFNKNREESDLHHAVDAVIVACTTPSDIAKVTAFYQRREQNKELAKKTEPHFPQPWPHFADELRARLSKHPKESIKALNLGNYDDQKLESLQPVFVSRMPKRSVTGAAHQETLRRYVGIDERSGKIQTVVKTKLSEIKLDASGHFPMYGKESDPRTYEAIRQRLLEHNNDPKKAFQEPLYKPKKNGEPGPVIRTVKIIDTKNQVIPLNDGKTVAYNSNIVRVDVFEKDGKYYCVPVYTMDIMKGILPNKAIEPNKPYSEWKEMTEDYTFRFSLYPNDLIRIELPREKTVKTAAGEEINVKDVFVYYKTIDSANGGLELISHDHRFSLRGVGSRTLKRFEKYQVDVLGNIYKVRGEKRVGLASSAHSKPGKTIRPLQSTRD

SEQ ID NO: 43 - protein, 1228 aa, Unknown
  Lachnospiraceae bacterium
MSKLEKFTNCYSLSKTLRFKAIPVGKTQENIDNKRLLVEDEKRAEDYKGVKKLLDRYYLSFINDVLHSIKLKNLNNYISLFRKKTRTEKENKELENLEINLRKEIAKAFKGNEGYKSLFKKDIIETILPEFLDDKDEIALVNSFNGFTTAFTGFFDNRENMFSEEAKSTSIAFRCINENLTRYISNMDIFEKVDAIFDKHEVQEIKEKILNSDYDVEDFFEGEFFNFVLTQEGIDVYNAIIGGFVTESGEKIKGLNEYINLYNQKTKQKLPKFKPLYKQVLSDRESLSFYGEGYTSDEEVLEVFRNTLNKNSEIFSSIKKLEKLFKNFDEYSSAGIFVKNGPAISTISKDIFGEWNVIRDKWNAEYDDIHLKKKAVVTEKYEDDRRKSFKKIGSFSLEQLQEYADADLSVVEKLKEIIIQKVDEIYKVYGSSEKLFDADFVLEKSLKKNDAVVAIMKDLLDSVKSFENYIKAFFGEGKETNRDESFYGDFVLAYDILLKVDHIYDAIRNYVTQKPYSKDKFKLYFQNPQFMGGWDKDKETDYRATILRYGSKYYLAIMDKKYAKCLQKIDKDDVNGNYEKINYKLLPGPNKMLPKVFFSKKWMAYYNPSEDIQKIYKNGTFKKGDMFNLNDCHKLIDFFKDSISRYPKWSNAYDFNFSETEKYKDIAGFYREVEEQGYKVSFESASKKEVDKLVEEGKLYMFQIYNKDFSDKSHGTPNLHTMYFKLLFDENNHGQIRLSGGAELFMRRASLKKEELVVHPANSPIANKNPDNPKKTTTLSYDVYKDKRFSEDQYELHIPIAINKCPKNIFKINTEVRVLLKHDDNPYVIGIDRGERNLLYIVVVDGKGNIVEQYSLNEIINNFNGIRIKTDYHSLLDKKEKERFEARQNWTSIENIKELKAGYISQVVHKICELVEKYDAVIALEDLNSGFKNSRVKVEKQVYQKFEKMLIDKLNYMVDKKSNPCATGGALKGYQITNKFESFKSMSTQNGFIFYIPAWLTSKIDPSTGFVNLLKTKYTSIADSKKFISSFDRIMYVPEEDLFEFALDYKNFSRTDADYIKKWKLYSYGNRIRIFRNPKKNNVFDWEEVCLTSAYKELFNKYGINYQQGDIRALLCEQSDKAFYSSFMALMSLMLQMRNSITGRTDVDFLISPVKNSDGIFYDSRNYEAQENAILPKNADANGAYNIARKVLWAIGQFKKAEDEKLDKVKIAISNKEWLEYAQTSVKH

SEQ ID NO: 44 - protein, 1108 aa, Unknown
  Bacillushisashii
MATRSFILKIEPNEEVKKGLWKTHEVLNHGIAYYMNILKLIRQEAIYEHHEQDPKNPKKVSKAEIQAELWDFVLKMQKCNSFTHEVDKDEVFNILRELYEELVPSSVEKKGEANQLSNKFLYPLVDPNSQSGKGTASSGRKPRWYNLKIAGDPSWEEEKKKWEEDKKKDPLAKILGKLAEYGLIPLFIPYTDSNEPIVKEIKWMEKSRNQSVRRLDKDMFIQALERFLSWESWNLKVKEEYEKVEKEYKTLEERIKEDIQALKALEQYEKERQEQLLRDTLNTNEYRLSKRGLRGWREIIQKWLKMDENEPSEKYLEVFKDYQRKHPREAGDYSVYEFLSKKENHFIWRNHPEYPYLYATFCEIDKKKKDAKQQATFTLADPINHPLWVRFEERSGSNLNKYRILTEQLHTEKLKKKLTVQLDRLIYPTESGGWEEKGKVDIVLLPSRQFYNQIFLDIEEKGKHAFTYKDESIKFPLKGTLGGARVQFDRDHLRRYPHKVESGNVGRIYFNMTVNIEPTESPVSKSLKIHRDDFPKVVNFKPKELTEWIKDSKGKKLKSGIESLEIGLRVMSIDLGQRQAAAASIFEVVDQKPDIEGKLFFPIKGTELYAVHRASFNIKLPGETLVKSREVLRKAREDNLKLMNQKLNFLRNVLHFQQFEDITEREKRVTKWISRQENSDVPLVYQDELIQIRELMYKPYKDWVAFLKQLHKRLEVEIGKEVKHWRKSLSDGRKGLYGISLKNIDEIDRTRKFLLRWSLRPTEPGEVRRLEPGQRFAIDQLNHLNALKEDRLKKMANTIIMHALGYCYDVRKKKWQAKNPACQIILFEDLSNYNPYEERSRFENSKLMKWSRREIPRQVALQGEIYGLQVGEVGAQFSSRFHAKTGSPGIRCSVVTKEKLQDNRFFKNLQREGRLTLDKIAVLKEGDLYPDKGGEKFISLSKDRKCVTTHADINAAQNLQKRFWTRTHGFYKVYCKAYQVDGQTVYIPESKDQKQKIIEEFGEGYFILKDGVYEWVNAGKLKIKKGSSKQSSSELVDSDILKDSFDLASELKGEKLMLYRDPSGNVFPSDKWMAAGVFFGKLERILISKLTNQYSISTIEDDSSKQSM

SEQ ID NO: 45 - protein, 1307 aa, Unknown
  Acidaminococcus sp. (strain BV3L6)
MTQFEGFTNLYQVSKTLRFELIPQGKTLKHIQEQGFIEEDKARNDHYKELKPIIDRIYKTYADQCLQLVQLDWENLSAAIDSYRKEKTEETRNALIEEQATYRNAIHDYFIGRTDNLTDAINKRHAEIYKGLFKAELFNGKVLKQLGTVTTTEHENALLRSFDKFTTYFSGFYENRKNVFSAEDISTAIPHRIVQDNFPKFKENCHIFTRLITAVPSLREHFENVKKAIGIFVSTSIEEVFSFPFYNQLLTQTQIDLYNQLLGGISREAGTEKIKGLNEVLNLAIQKNDETAHIIASLPHRFIPLFKQILSDRNTLSFILEEFKSDEEVIQSFCKYKTLLRNENVLETAEALFNELNSIDLTHIFISHKKLETISSALCDHWDTLRNALYERRISELTGKITKSAKEKVQRSLKHEDINLQEIISAAGKELSEAFKQKTSEILSHAHAALDQPLPTTLKKQEEKEILKSQLDSLLGLYHLLDWFAVDESNEVDPEFSARLTGIKLEMEPSLSFYNKARNYATKKPYSVEKFKLNFQMPTLASGWDVNKEKNNGAILFVKNGLYYLGIMPKQKGRYKALSFEPTEKTSEGFDKMYYDYFPDAAKMIPKCSTQLKAVTAHFQTHTTPILLSNNFIEPLEITKEIYDLNNPEKEPKKFQTAYAKKTGDQKGYREALCKWIDFTRDFLSKYTKTTSIDLSSLRPSSQYKDLGEYYAELNPLLYHISFQRIAEKEIMDAVETGKLYLFQIYNKDFAKGHHGKPNLHTLYWTGLFSPENLAKTSIKLNGQAELFYRPKSRMKRMAHRLGEKMLNKKLKDQKTPIPDTLYQELYDYVNHRLSHDLSDEARALLPNVITKEVSHEIIKDRRFTSDKFFFHVPITLNYQAANSPSKFNQRVNAYLKEHPETPIIGIDRGERNLIYITVIDSTGKILEQRSLNTIQQFDYQKKLDNREKERVAARQAWSVVGTIKDLKQGYLSQVIHEIVDLMIHYQAVVVLENLNFGFKSKRTGIAEKAVYQQFEKMLIDKLNCLVLKDYPAEKVGGVLNPYQLTDQFTSFAKMGTQSGFLFYVPAPYTSKIDPLTGFVDPFVWKTIKNHESRKHFLEGFDFLHYDVKTGDFILHFKMNRNLSFQRGLPGFMPAWDIVFEKNETQFDAKGTPFIAGKRIVPVIENHRFTGRYRDLYPANELIALLEEKGIVFRDGSNILPKLLENDDSHAIDTMVALIRSVLQMRNSNAATGEDYINSPVRDLNGVCFDSRFQNPEWPMDADANGAYHIALKGQLLLNHLKESKDLKLQNGISNQDWLAYIQELRN

SEQ ID NO: 46 - protein, 1307 aa, Artificial Sequence
  Synthetic
MTQFEGFTNLYQVSKTLRFELIPQGKTLKHIQEQGFIEEDKARNDHYKELKPIIDRIYKTYADQCLQLVQLDWENLSAAIDSYRKEKTEETRNALIEEQATYRNAIHDYFIGRTDNLTDAINKRHAEIYKGLFKAELFNGKVLKQLGTVTTTEHENALLRSFDKFTTYFSGFYENRKNVFSAEDISTAIPHRIVQDNFPKFKENCHIFTRLITAVPSLREHFENVKKAIGIFVSTSIEEVFSFPFYNQLLTQTQIDLYNQLLGGISREAGTEKIKGLNEVLNLAIQKNDETAHIIASLPHRFIPLFKQILSDRNTLSFILEEFKSDEEVIQSFCKYKTLLRNENVLETAEALFNELNSIDLTHIFISHKKLETISSALCDHWDTLRNALYERRISELTGKITKSAKEKVQRSLKHEDINLQEIISAAGKELSEAFKQKTSEILSHAHAALDQPLPTTLKKQEEKEILKSQLDSLLGLYHLLDWFAVDESNEVDPEFSARLTGIKLEMEPSLSFYNKARNYATKKPYSVEKFKLNFQMPTLASGWDVNKEKNNGAILFVKNGLYYLGIMPKQKGRYKALSFEPTEKTSEGFDKMYYDYFPDAAKMIPKCSTQLKAVTAHFQTHTTPILLSNNFIEPLEITKEIYDLNNPEKEPKKFQTAYAKKTGDQKGYREALCKWIDFTRDFLSKYTKTTSIDLSSLRPSSQYKDLGEYYAELNPLLYHISFQRIAEKEIMDAVETGKLYLFQIYNKDFAKGHHGKPNLHTLYWTGLFSPENLAKTSIKLNGQAELFYRPKSRMKRMAHRLGEKMLNKKLKDQKTPIPDTLYQELYDYVNHRLSHDLSDEARALLPNVITKEVSHEIIKDRRFTSDKFFFHVPITLNYQAANSPSKFNQRVNAYLKEHPETPIIGIDRGERNLIYITVIDSTGKILEQRSLNTIQQFDYQKKLDNREKERVAARQAWSVVGTIKDLKQGYLSQVIHEIVDLMIHYQAVVVLENLNFGFKSKRTGIAEKAVYQQFEKMLIDKLNCLVLKDYPAEKVGGVLNPYQLTDQFTSFAKMGTQSGFLFYVPAPYTSKIDPLTGFVDPFVWKTIKNHESRKHFLEGFDFLHYDVKTGDFILHFKMNRNLSFQRGLPGFMPAWDIVFEKNETQFDAKGTPFIAGKRIVPVIENHRFTGRYRDLYPANELIALLEEKGIVFRDGSNILPKLLENDDSHAIDTMVALIRSVLQMANSNAATGEDYINSPVRDLNGVCFDSRFQNPEWPMDADANGAYHIALKGQLLLNHLKESKDLKLQNGISNQDWLAYIQELRN

SEQ ID NO: 47 - protein, 1259 aa, Unknown
  Lachnospiraceae bacterium GAM79
MNYKTGLEDFIGKESLSKTLRNALIPTESTKIHMEEMGVIRDDELRAEKQQELKEIMDDYYRTFIEEKLGQIQGIQWNSLFQKMEETMEDISVRKDLDKIQNEKRKEICCYFTSDKRFKDLFNAKLITDILPNFIKDNKEYTEEEKAEKEQTRVLFQRFATAFTNYFNQRRNNFSEDNISTAISFRIVNENSEIHLQNMRAFQRIEQQYPEEVCGMEEEYKDMLQEWQMKHIYSVDFYDRELTQPGIEYYNGICGKINEHMNQFCQKNRINKNDFRMKKLHKQILCKKSSYYEIPFRFESDQEVYDALNEFIKTMKKKEIIRRCVHLGQECDDYDLGKIYISSNKYEQISNALYGSWDTIRKCIKEEYMDALPGKGEKKEEKAEAAAKKEEYRSIADIDKIISLYGSEMDRTISAKKCITEICDMAGQISIDPLVCNSDIKLLQNKEKTTEIKTILDSFLHVYQWGQTFIVSDIIEKDSYFYSELEDVLEDFEGITTLYNHVRSYVTQKPYSTVKFKLHFGSPTLANGWSQSKEYDNNAILLMRDQKFYLGIFNVRNKPDKQIIKGHEKEEKGDYKKMIYNLLPGPSKMLPKVFITSRSGQETYKPSKHILDGYNEKRHIKSSPKFDLGYCWDLIDYYKECIHKHPDWKNYDFHFSDTKDYEDISGFYREVEMQGYQIKWTYISADEIQKLDEKGQIFLFQIYNKDFSVHSTGKDNLHTMYLKNLFSEENLKDIVLKLNGEAELFFRKASIKTPIVHKKGSVLVNRSYTQTVGNKEIRVSIPEEYYTEIYNYLNHIGKGKLSSEAQRYLDEGKIKSFTATKDIVKNYRYCCDHYFLHLPITINFKAKSDVAVNERTLAYIAKKEDIHIIGIDRGERNLLYISVVDVHGNIREQRSFNIVNGYDYQQKLKDREKSRDAARKNWEEIEKIKELKEGYLSMVIHYIAQLVVKYNAVVAMEDLNYGFKTGRFKVERQVYQKFETMLIEKLHYLVFKDREVCEEGGVLRGYQLTYIPESLKKVGKQCGFIFYVPAGYTSKIDPTTGFVNLFSFKNLTNRESRQDFVGKFDEIRYDRDKKMFEFSFDYNNYIKKGTILASTKWKVYTNGTRLKRIVVNGKYTSQSMEVELTDAMEKMLQRAGIEYHDGKDLKGQIVEKGIEAEIIDIFRLTVQMRNSRSESEDREYDRLISPVLNDKGEFFDTATADKTLPQDADANGAYCIALKGLYEVKQIKENWKENEQFPRNKLVQDNKTWFDFMQKKRYL

SEQ ID NO: 48 - protein, 1306 aa, Prevotella copri
MAKNFEDFKRLYSLSKTLRFEAKPIGATLDNIVKSGLLDEDEHRAASYVKVKKLIDEYHKVFIDRVLDDGCLPLENKGNNNSLAEYYESYVSRAQDEDAKKKFKEIQQNLRSVIAKKLTEDKAYANLFGNKLIESYKDKEDKKKIIDSDLIQFINTAESTQLDSMSQDEAKELVKEFWGFVTYFYGFFDNRKNMYTAEEKSTGIAYRLVNENLPKFIDNIEAFNRAITRPEIQENMGVLYSDFSEYLNVESIQEMFQLDYYNMLLTQKQIDVYNAIIGGKTDDEHDVKIKGINEYINLYNQQHKDDKLPKLKALFKQILSDRNAISWLPEEFNSDQEVLNAIKDCYERLAENVLGDKVLKSLLGSLADYSLDGIFIRNDLQLTDISQKMFGNWGVIQNAIMQNIKRVAPARKHKESEEDYEKRIAGIFKKADSFSISYINDCLNEADPNNAYFVENYFATFGAVNTPTMQRENLFALVQNAYTEVAALLHSDYPTVKHLAQDKANVSKIKALLDAIKSLQHFVKPLLGKGDESDKDERFYGELASLWAELDTVTPLYNMIRNYMTRKPYSQKKIKLNFENPQLLGGWDANKEKDYATIILRRNGLYYLAIMDKDSRKLLGKAMPSDGECYEKMVYKFFKDVTTMIPKCSTQLKDVQAYFKVNTDDYVLNSKAFNKPLTITKEVFDLNNVLYGKYKKFQKGYLTATGDNVGYTHAVNVWIKFCMDFLNSYDSTCIYDFSSLKPESYLSLDAFYQDANLLLYKLSFARASVSYINQLVEEGKMYLFQIYNKDFSEYSKGTPNMHTLYWKALFDERNLADVVYKLNGQAEMFYRKKSIENTHPTHPANHPILNKNKDNKKKESLFDYDLIKDRRYTVDKFMFHVPITMNFKSVGSENINQDVKAYLRHADDMHIIGIDRGERHLLYLVVIDLQGNIKEQYSLNEIVNEYNGNTYHTNYHDLLDVREEERLKARQSWQTIENIKELKEGYLSQVIHKITQLMVRYHAIVVLEDLSKGFMRSRQKVEKQVYQKFEKMLIDKLNYLVDKKTDVSTPGGLLNAYQLTCKSDSSQKLGKQSGFLFYIPAWNTSKIDPVTGFVNLLDTHSLNSKEKIKAFFSKFDAIRYNKDKKWFEFNLDYDKFGKKAEDTRTKWTLCTRGMRIDTFRNKEKNSQWDNQEVDLTTEMKSLLEHYYIDIHGNLKDAISAQTDKAFFTGLLHILKLTLQMRNSITGTETDYLVSPVADENGIFYDSRSCGNQLPENADANGAYNIARKGLMLIEQIKNAEDLNNVKFDISNKAWLNFAQQKPYKNG

SEQ ID NO: 49 - protein, 1142 aa, Eubacterium rectale
MFSAKLISDILPEFVIHNNNYSASEKEEKTQVIKLFSRFATSFKDYFKNRANCFSANDISSSSCHRIVNDNAEIFFSNALVYRRIVKNLSNDDINKISGDMKDSLKEMSLEEIYSYEKYGEFITQEGISFYNDICGKVNLFMNLYCQKNKENKNLYKLRKLHKQILCIADTSYEVPYKFESDEEVYQSVNGFLDNISSKHIVERLRKIGENYNGYNLDKIYIVSKFYESVSQKTYRDWETINTALEIHYNNILPGNGKSKADKVKKAVKNDLQKSITEINELVSNYKLCPDDNIKAETYIHEISHILNNFEAQELKYNPEIHLVESELKASELKNVLDVIMNAFHWCSVFMTEELVDKDNNFYAELEEIYDEIYPVISLYNLVRNYVTQKPYSTKKIKLNFGIPTLADGWSKSKEYSNNAIILMRDNLYYLGIFNAKNKPDKKIIEGNTSENKGDYKKMIYNLLPGPNKMIPKVFLSSKTGVETYKPSAYILEGYKQNKHLKSSKDFDITFCHDLIDYFKNCIAIHPEWKNFGFDFSDTSTYEDISGFYREVELQGYKIDWTYISEKDIDLLQEKGQLYLFQIYNKDFSKKSSGNDNLHTMYLKNLFSEENLKDIVLKLNGEAEIFFRKSSIKNPIIHKKGSILVNRTYEAEEKDQFGNIQIVRKTIPENIYQELYKYFNDKSDKELSDEAAKLKNVVGHHEAATNIVKDYRYTYDKYFLHMPITINFKANKTSFINDRILQYIAKEKDLHVIGIDRGERNLIYVSVIDTCGNIVEQKSFNIVNGYDYQIKLKQQEGARQIARKEWKEIGKIKEIKEGYLSLVIHEISKMVIKYNAIIAMEDLSYGFKKGRFKVERQVYQKFETMLINKLNYLVFKDISITENGGLLKGYQLTYIPDKLKNVGHQCGCIFYVPAAYTSKIDPTTGFVNIFKFKDLTVDAKREFIKKFDSIRYDSDKNLFCFTFDYNNFITQNTVMSKSSWSVYTYGVRIKRRFVNGRFSNESDTIDITKDMEKTLEMTDINWRDGHDLRQDIIDYEIVQHIFEIFKLTVQMRNSLSELEDRDYDRLISPVLNENNIFYDSAKAGDALPKDADANGAYCIALKGLYEIKQITENWKEDGKFSRDKLKISNKDWFDFIQNKRYL

SEQ ID NO: 50 - protein, 1259 aa, Unknown
  Clostridium sp. AF34-10BH
MNYKTGLEDFIGKESLSKTLRNALIPTESTKIHMEEMGVIRDDELRAEKQQELKEIMDDYYRAFIEEKLGQIQGIQWNSLFQKMEETMEDISVRKDLDKIQNEKRKEICCYFTSDKRFKDLFNAKLITDILPNFIKDNKEYTEEEKAEKEQTRVLFQRFATAFTNYFNQRRNNFSEDNISTAISFRIVNENSEIHLQNMRAFQRIEQQYPEEVCGMEEEYKDMLQEWQMKHIYLVDFYDRVLTQPGIEYYNGICGKINEHMNQFCQKNRINKNDFRMKKLHKQILCKKSSYYEIPFRFESDQEVYDALNEFIKTMKEKEIICRCVHLGQKCDDYDLGKIYISSNKYEQISNALYGSWDTIRKCIKEEYMDALPGKGEKKEEKAEAAAKKEEYRSIADIDKIISLYGSEMDRTISAKKCITEICDMAGQISTDPLVCNSDIKLLQNKEKTTEIKTILDSFLHVYQWGQTFIVSDIIEKDSYFYSELEDVLEDFEGITTLYNHVRSYVTQKPYSTVKFKLHFGSPTLANGWSQSKEYDNNAILLMRDQKFYLGIFNVRNKPDKQIIKGHEKEEKGDYKKMIYNLLPGPSKMLPKVFITSRSGQETYKPSKHILDGYNEKRHIKSSPKFDLGYCWDLIDYYKECIHKHPDWKNYDFHFSDTKDYEDISGFYREVEMQGYQIKWTYISADEIQKLDEKGQIFLFQIYNKDFSVHSTGKDNLHTMYLKNLFSEENLKDIVLKLNGEAELFFRKASIKTPVVHKKGSVLVNRSYTQTVGDKEIRVSIPEEYYTEIYNYLNHIGRGKLSTEAQRYLEERKIKSFTATKDIVKNYRYCCDHYFLHLPITINFKAKSDIAVNERTLAYIAKKEDIHIIGIDRGERNLLYISVVDVHGNIREQRSFNIVNGYDYQQKLKDREKSRDAARKNWEEIEKIKELKEGYLSMVIHYIAQLVVKYNAVVAMEDLNYGFKTGRFKVERQVYQKFETMLIEKLHYLVFKDREVCEEGGVLRGYQLTYIPESLKKVGKQCGFIFYVPAGYTSKIDPTTGFVNLFSFKNLTNRESRQDFVGKFDEIRYDRDKKMFEFSFDYNNYIKKGTMLASTKWKVYTNGTRLKRIVVNGKYTSQSMEVELTDAMEKMLQRAGIEYHDGKDLKGQIVEKGIEAEIIDIFRLTVQMRNSRSESEDREYDRLISPVLNDKGEFFDTATADKTLPQDADANGAYCIALKGLYEVKQIKENWKENEQFPRNKLVQDNKTWFDFMQKKRYL

SEQ ID NO: 51 - protein, 1465 aa, Thermomonas hydrothermalis
MSEKTTQRAYTLRLNRASGECAVCQNNSCDCWHDALWATHKAVNRGAKAFGDWLLTLRGGLCHTLVEMEVPAKGNNPPQRPTDQERRDRRVLLALSWLSVEDEHGAPKEFIVATGRDSADDRAKKVEEKLREILEKRDFQEHEIDAWLQDCGPSLKAHIREDAVWVNRRALFDAAVERIKTLTWEEAWDFLEPFFGTQYFAGIGDGKDKDDAEGPARQGEKAKDLVQKAGQWLSARFGIGTGADFMSMAEAYEKIAKWASQAQNGDNGKATIEKLACALRPSEPPTLDTVLKCISGPGHKSATREYLKTLDKKSTVTQEDLNQLRKLADEDARNCRKKVGKKGKKPWADEVLKDVENSCELTYLQDNSPARHREFSVMLDHAARRVSMAHSWIKKAEQRRRQFESDAQKLKNLQERAPSAVEWLDRFCESRSMTTGANTGSGYRIRKRAIEGWSYVVQAWAEASCDTEDKRIAAARKVQADPEIEKFGDIQLFEALAADEAICVWRDQEGTQNPSILIDYVTGKTAEHNQKRFKVPAYRHPDELRHPVFCDFGNSRWSIQFAIHKEIRDRDKGAKQDTRQLQNRHGLKMRLWNGRSMTDVNLHWSSKRLTADLALDQNPNPNPTEVTRADRLGRAASSAFDHVKIKNVFNEKEWNGRLQAPRAELDRIAKLEEQGKTEQAEKLRKRLRWYVSFSPCLSPSGPFIVYAGQHNIQPKRSGQYAPHAQANKGRARLAQLILSRLPDLRILSVDLGHRFAAACAVWETLSSDAFRREIQGLNVLAGGSGEGDLFLHVEMTGDDGKRRTVVYRRIGPDQLLDNTPHPAPWARLDRQFLIKLQGEDEGVREASNEELWTVHKLEVEVGRTVPLIDRMVRSGFGKTEKQKERLKKLRELGWISAMPNEPSAETDEKEGEIRSISRSVDELMSSALGTLRLALKRHGNRARIAFAMTADYKPMPGGQKYYFHEAKEASKNDDETKRRDNQIEFLQDALSLWHDLFSSPDWEDNEAKKLWQNHIATLPNYQTPEEISAELKRVERNKKRKENRDKLRTAAKALAENDQLRQHLHDTWKERWESDDQQWKERLRSLKDWIFPRGKAEDNPSIRHVGGLSITRINTISGLYQILKAFKMRPEPDDLRKNIPQKGDDELENFNRRLLEARDRLREQRVKQLASRIIEAALGVGRIKIPKNGKLPKRPRTTVDTPCHAVVIESLKTYRPDDLRTRRENRQLMQWSSAKVRKYLKEGCELYGLHFLEVPANYTSRQCSRTGLPGIRCDDVPTGDFLKAPWWRRAINTAREKNGGDAKDRFLVDLYDHLNNLQSKGEALPATVRVPRQGGNLFIAGAQLDDTNKERRAIQADLNAAANIGLRALLDPDWRGRWWYVPCKDGTSEPALDRIEGSTAFNDVRSLPTGDNSSRRAPREIENLWRDPSGDSLESGTWSPTRAYWDTVQSRVIELLRRHAGLPTS

SEQ ID NO: 52 - protein, 1090 aa, Laceyella sacchari
MSIRSFKLKLKTKSGVNAEQLRRGLWRTHQLINDGIAYYMNWLVLLRQEDLFIRNKETNEIEKRSKEEIQAVLLERVHKQQQRNQWSGEVDEQTLLQALRQLYEEIVPSVIGKSGNASLKARFFLGPLVDPNNKTTKDVSKSGPTPKWKKMKDAGDPNWVQEYEKYMAERQTLVRLEEMGLIPLFPMYTDEVGDIHWLPQASGYTRTWDRDMFQQAIERLLSWESWNRRVRERRAQFEKKTHDFASRFSESDVQWMNKLREYEAQQEKSLEENAFAPNEPYALTKKALRGWERVYHSWMRLDSAASEEAYWQEVATCQTAMRGEFGDPAIYQFLAQKENHDIWRGYPERVIDFAELNHLQRELRRAKEDATFTLPDSVDHPLWVRYEAPGGTNIHGYDLVQDTKRNLTLILDKFILPDENGSWHEVKKVPFSLAKSKQFHRQVWLQEEQKQKKREVVFYDYSTNLPHLGTLAGAKLQWDRNFLNKRTQQQIEETGEIGKVFFNISVDVRPAVEVKNGRLQNGLGKALTVLTHPDGTKIVTGWKAEQLEKWVGESGRVSSLGLDSLSEGLRVMSIDLGQRTSATVSVFEITKEAPDNPYKFFYQLEGTEMFAVHQRSFLLALPGENPPQKIKQMREIRWKERNRIKQQVDQLSAILRLHKKVNEDERIQAIDKLLQKVASWQLNEEIATAWNQALSQLYSKAKENDLQWNQAIKNAHHQLEPVVGKQISLWRKDLSTGRQGIAGLSLWSIEELEATKKLLTRWSKRSREPGVVKRIERFETFAKQIQHHINQVKENRLKQLANLIVMTALGYKYDQEQKKWIEVYPACQVVLFENLRSYRFSFERSRRENKKLMEWSHRSIPKLVQMQGELFGLQVADVYAAYSSRYHGRTGAPGIRCHALTEADLRNETNIIHELIEAGFIKEEHRPYLQQGDLVPWSGGELFATLQKPYDNPRILTLHADINAAQNIQKRFWHPSMWFRVNCESVMEGEIVTYVPKNKTVHKKQGKTFRFVKVEGSDVYEWAKWSKNRNKNTFSSITERKPPSSMILFRDPSGTFFKEQEWVEQKTFWGKVQSMIQAYMKKTIVQRMEE

SEQ ID NO: 53 - protein, 1194 aa, Dsulfonatronum thiodismutans
MVLGRKDDTAELRRALWTTHEHVNLAVAEVERVLLRCRGRSYWTLDRRGDPVHVPESQVAEDALAMAREAQRRNGWPVVGEDEEILLALRYLYEQIVPSCLLDDLGKPLKGDAQKIGTNYAGPLFDSDTCRRDEGKDVACCGPFHEVAGKYLGALPEWATPISKQEFDGKDASHLRFKATGGDDAFFRVSIEKANAWYEDPANQDALKNKAYNKDDWKKEKDKGISSWAVKYIQKQLQLGQDPRTEVRRKLWLELGLLPLFIPVFDKTMVGNLWNRLAVRLALAHLLSWESWNHRAVQDQALARAKRDELAALFLGMEDGFAGLREYELRRNESIKQHAFEPVDRPYVVSGRALRSWTRVREEWLRHGDTQESRKNICNRLQDRLRGKFGDPDVFHWLAEDGQEALWKERDCVTSFSLLNDADGLLEKRKGYALMTFADARLHPRWAMYEAPGGSNLRTYQIRKTENGLWADVVLLSPRNESAAVEEKTFNVRLAPSGQLSNVSFDQIQKGSKMVGRCRYQSANQQFEGLLGGAEILFDRKRIANEQHGATDLASKPGHVWFKLTLDVRPQAPQGWLDGKGRPALPPEAKHFKTALSNKSKFADQVRPGLRVLSVDLGVRSFAACSVFELVRGGPDQGTYFPAADGRTVDDPEKLWAKHERSFKITLPGENPSRKEEIARRAAMEELRSLNGDIRRLKAILRLSVLQEDDPRTEHLRLFMEAIVDDPAKSALNAELFKGFGDDRFRSTPDLWKQHCHFFHDKAEKVVAERFSRWRTETRPKSSSWQDWRERRGYAGGKSYWAVTYLEAVRGLILRWNMRGRTYGEVNRQDKKQFGTVASALLHHINQLKEDRIKTGADMIIQAARGFVPRKNGAGWVQVHEPCRLILFEDLARYRFRTDRSRRENSRLMRWSHREIVNEVGMQGELYGLHVDTTEAGFSSRYLASSGAPGVRCRHLVEEDFHDGLPGMHLVGELDWLLPKDKDRTANEARRLLGGMVRPGMLVPWDGGELFATLNAASQLHVIHADINAAQNLQRRFWGRCGEAIRIVCNQLSVDGSTRYEMAKAPKARLLGALQQLKNGDAPFHLTSIPNSQKPENSYVMTPTNAGKKYRAGPGEKSSGEEDELALDIVEQAEELAQGRKTFFRDPSGVFFAPDRWLPSEIYWSRIRRRIWQVTLERNSSGRQERAEMDEMPY

SEQ ID NO: 54 - protein, 1387 aa, Artificial Sequence
  Synthetic
DYKVYDVRKMIAKSEQEIGKATAKYFFYSNIMNFFKTEITLANGEIRKRPLIETNGETGEIVWDKGRDFATVRKVLSMPQVNIVKKTEVQTGGFSKESILPKRNSDKLIARKKDWDPKKYGGFDSPTVAYSVLVVAKVEKGKSKKLKSVKELLGITIMERSSFEKNPIDFLEAKGYKEVKKDLIIKLPKYSLFELENGRKRMLASAGELQKGNELALPSKYVNFLYLASHYEKLKGSPEDNEQKQLFVEQHKHYLDEIIEQISEFSKRVILADANLDKVLSAYNKHRDKPIREQAENIIHLFTLTNLGAPAAFKYFDTTIDRKRYTSTKEVLDATLIHQSITGLYETRIDLSQLGGDGGSGGSGGSGGSGGSGGSGGDKKYSIGLAIGTNSVGWAVITDEYKVPSKKFKVLGNTDRHSIKKNLIGALLFDSGETAEATRLKRTARRRYTRRKNRICYLQEIFSNEMAKVDDSFFHRLEESFLVEEDKKHERHPIFGNIVDEVAYHEKYPTIYHLRKKLVDSTDKADLRLIYLALAHMIKFRGHFLIEGDLNPDNSDVDKLFIQLVQTYNQLFEENPINASGVDAKAILSARLSKSRRLENLIAQLPGEKKNGLFGNLIALSLGLTPNFKSNFDLAEDAKLQLSKDTYDDDLDNLLAQIGDQYADLFLAAKNLSDAILLSDILRVNTEITKAPLSASMIKRYDEHHQDLTLLKALVRQQLPEKYKEIFFDQSKNGYAGYIDGGASQEEFYKFIKPILEKMDGTEELLVKLNREDLLRKQRTFDNGSIPHQIHLGELHAILRRQEDFYPFLKDNREKIEKILTFRIPYYVGPLARGNSRFAWMTRKSEETITPWNFEEVVDKGASAQSFIERMTNFDKNLPNEKVLPKHSLLYEYFTVYNELTKVKYVTEGMRKPAFLSGEQKKAIVDLLFKTNRKVTVKQLKEDYFKKIECFDSVEISGVEDRFNASLGTYHDLLKIIKDKDFLDNEENEDILEDIVLTLTLFEDREMIEERLKTYAHLFDDKVMKQLKRRRYTGWGRLSRKLINGIRDKQSGKTILDFLKSDGFANRNFMQLIHDDSLTFKEDIQKAQVSGQGDSLHEHIANLAGSPAIKKGILQTVKVVDELVKVMGRHKPENIVIEMARENQTTQKGQKNSRERMKRIEEGIKELGSQILKEHPVENTQLQNEKLYLYYLQNGRDMYVDQELDINRLSDYDVDHIVPQSFLKDDSIDNKVLTRSDKNRGKSDNVPSEEVVKKMKNYWRQLLNAKLITQRKFDNLTKAERGGLSELDKAGFIKRQLVETRQITKHVAQILDSRMNTKYDENDKLIREVKVITLKSKLVSDFRKDFQFYKVREINNYHHAHDAYLNAVVGTALIKKYPKLESEFVYG

SEQ ID NO: 55 - protein, 1388 aa, Artificial Sequence
  Synthetic
EIGKATAKYFFYSNIMNFFKTEITLANGEIRKRPLIETNGETGEIVWDKGRDFATVRKVLSMPQVNIVKKTEVQTGGFSKESILPKRNSDKLIARKKDWDPKKYGGFDSPTVAYSVLVVAKVEKGKSKKLKSVKELLGITIMERSSFEKNPIDFLEAKGYKEVKKDLIIKLPKYSLFELENGRKRMLASAGELQKGNELALPSKYVNFLYLASHYEKLKGSPEDNEQKQLFVEQHKHYLDEIIEQISEFSKRVILADANLDKVLSAYNKHRDKPIREQAENIIHLFTLTNLGAPAAFKYFDTTIDRKRYTSTKEVLDATLIHQSITGLYETRIDLSQLGGDGGSGGSGGSGGSGGSGGSGGMDKKYSIGLAIGTNSVGWAVITDEYKVPSKKFKVLGNTDRHSIKKNLIGALLFDSGETAEATRLKRTARRRYTRRKNRICYLQEIFSNEMAKVDDSFFHRLEESFLVEEDKKHERHPIFGNIVDEVAYHEKYPTIYHLRKKLVDSTDKADLRLIYLALAHMIKFRGHFLIEGDLNPDNSDVDKLFIQLVQTYNQLFEENPINASGVDAKAILSARLSKSRRLENLIAQLPGEKKNGLFGNLIALSLGLTPNFKSNFDLAEDAKLQLSKDTYDDDLDNLLAQIGDQYADLFLAAKNLSDAILLSDILRVNTEITKAPLSASMIKRYDEHHQDLTLLKALVRQQLPEKYKEIFFDQSKNGYAGYIDGGASQEEFYKFIKPILEKMDGTEELLVKLNREDLLRKQRTFDNGSIPHQIHLGELHAILRRQEDFYPFLKDNREKIEKILTFRIPYYVGPLARGNSRFAWMTRKSEETITPWNFEEVVDKGASAQSFIERMTNFDKNLPNEKVLPKHSLLYEYFTVYNELTKVKYVTEGMRKPAFLSGEQKKAIVDLLFKTNRKVTVKQLKEDYFKKIECFDSVEISGVEDRFNASLGTYHDLLKIIKDKDFLDNEENEDILEDIVLTLTLFEDREMIEERLKTYAHLFDDKVMKQLKRRRYTGWGRLSRKLINGIRDKQSGKTILDFLKSDGFANRNFMQLIHDDSLTFKEDIQKAQVSGQGDSLHEHIANLAGSPAIKKGILQTVKVVDELVKVMGRHKPENIVIEMARENQTTQKGQKNSRERMKRIEEGIKELGSQILKEHPVENTQLQNEKLYLYYLQNGRDMYVDQELDINRLSDYDVDHIVPQSFLKDDSIDNKVLTRSDKNRGKSDNVPSEEVVKKMKNYWRQLLNAKLITQRKFDNLTKAERGGLSELDKAGFIKRQLVETRQITKHVAQILDSRMNTKYDENDKLIREVKVITLKSKLVSDFRKDFQFYKVREINNYHHAHDAYLNAVVGTALIKKYPKLESEFVYGDYKVYDVRKMIAKSEQ

SEQ ID NO: 56 - protein, 1387 aa, Artificial Sequence
  Synthetic
NIMNFFKTEITLANGEIRKRPLIETNGETGEIVWDKGRDFATVRKVLSMPQVNIVKKTEVQTGGFSKESILPKRNSDKLIARKKDWDPKKYGGFDSPTVAYSVLVVAKVEKGKSKKLKSVKELLGITIMERSSFEKNPIDFLEAKGYKEVKKDLIIKLPKYSLFELENGRKRMLASAGELQKGNELALPSKYVNFLYLASHYEKLKGSPEDNEQKQLFVEQHKHYLDEIIEQISEFSKRVILADANLDKVLSAYNKHRDKPIREQAENIIHLFTLTNLGAPAAFKYFDTTIDRKRYTSTKEVLDATLIHQSITGLYETRIDLSQLGGDGGSGGSGGSGGSGGSGGSGGDKKYSIGLAIGTNSVGWAVITDEYKVPSKKFKVLGNTDRHSIKKNLIGALLFDSGETAEATRLKRTARRRYTRRKNRICYLQEIFSNEMAKVDDSFFHRLEESFLVEEDKKHERHPIFGNIVDEVAYHEKYPTIYHLRKKLVDSTDKADLRLIYLALAHMIKFRGHFLIEGDLNPDNSDVDKLFIQLVQTYNQLFEENPINASGVDAKAILSARLSKSRRLENLIAQLPGEKKNGLFGNLIALSLGLTPNFKSNFDLAEDAKLQLSKDTYDDDLDNLLAQIGDQYADLFLAAKNLSDAILLSDILRVNTEITKAPLSASMIKRYDEHHQDLTLLKALVRQQLPEKYKEIFFDQSKNGYAGYIDGGASQEEFYKFIKPILEKMDGTEELLVKLNREDLLRKQRTFDNGSIPHQIHLGELHAILRRQEDFYPFLKDNREKIEKILTFRIPYYVGPLARGNSRFAWMTRKSEETITPWNFEEVVDKGASAQSFIERMTNFDKNLPNEKVLPKHSLLYEYFTVYNELTKVKYVTEGMRKPAFLSGEQKKAIVDLLFKTNRKVTVKQLKEDYFKKIECFDSVEISGVEDRFNASLGTYHDLLKIIKDKDFLDNEENEDILEDIVLTLTLFEDREMIEERLKTYAHLFDDKVMKQLKRRRYTGWGRLSRKLINGIRDKQSGKTILDFLKSDGFANRNFMQLIHDDSLTFKEDIQKAQVSGQGDSLHEHIANLAGSPAIKKGILQTVKVVDELVKVMGRHKPENIVIEMARENQTTQKGQKNSRERMKRIEEGIKELGSQILKEHPVENTQLQNEKLYLYYLQNGRDMYVDQELDINRLSDYDVDHIVPQSFLKDDSIDNKVLTRSDKNRGKSDNVPSEEVVKKMKNYWRQLLNAKLITQRKFDNLTKAERGGLSELDKAGFIKRQLVETRQITKHVAQILDSRMNTKYDENDKLIREVKVITLKSKLVSDFRKDFQFYKVREINNYHHAHDAYLNAVVGTALIKKYPKLESEFVYGDYKVYDVRKMIAKSEQEIGKATAKYFFYS

SEQ ID NO: 57 - protein, 1388 aa, Artificial Sequence
  Synthetic
PEDNEQKQLFVEQHKHYLDEIIEQISEFSKRVILADANLDKVLSAYNKHRDKPIREQAENIIHLFTLTNLGAPAAFKYFDTTIDRKRYTSTKEVLDATLIHQSITGLYETRIDLSQLGGDGGSGGSGGSGGSGGSGGSGGMDKKYSIGLAIGTNSVGWAVITDEYKVPSKKFKVLGNTDRHSIKKNLIGALLFDSGETAEATRLKRTARRRYTRRKNRICYLQEIFSNEMAKVDDSFFHRLEESFLVEEDKKHERHPIFGNIVDEVAYHEKYPTIYHLRKKLVDSTDKADLRLIYLALAHMIKFRGHFLIEGDLNPDNSDVDKLFIQLVQTYNQLFEENPINASGVDAKAILSARLSKSRRLENLIAQLPGEKKNGLFGNLIALSLGLTPNFKSNFDLAEDAKLQLSKDTYDDDLDNLLAQIGDQYADLFLAAKNLSDAILLSDILRVNTEITKAPLSASMIKRYDEHHQDLTLLKALVRQQLPEKYKEIFFDQSKNGYAGYIDGGASQEEFYKFIKPILEKMDGTEELLVKLNREDLLRKQRTFDNGSIPHQIHLGELHAILRRQEDFYPFLKDNREKIEKILTFRIPYYVGPLARGNSRFAWMTRKSEETITPWNFEEVVDKGASAQSFIERMTNFDKNLPNEKVLPKHSLLYEYFTVYNELTKVKYVTEGMRKPAFLSGEQKKAIVDLLFKTNRKVTVKQLKEDYFKKIECFDSVEISGVEDRFNASLGTYHDLLKIIKDKDFLDNEENEDILEDIVLTLTLFEDREMIEERLKTYAHLFDDKVMKQLKRRRYTGWGRLSRKLINGIRDKQSGKTILDFLKSDGFANRNFMQLIHDDSLTFKEDIQKAQVSGQGDSLHEHIANLAGSPAIKKGILQTVKVVDELVKVMGRHKPENIVIEMARENQTTQKGQKNSRERMKRIEEGIKELGSQILKEHPVENTQLQNEKLYLYYLQNGRDMYVDQELDINRLSDYDVDHIVPQSFLKDDSIDNKVLTRSDKNRGKSDNVPSEEVVKKMKNYWRQLLNAKLITQRKFDNLTKAERGGLSELDKAGFIKRQLVETRQITKHVAQILDSRMNTKYDENDKLIREVKVITLKSKLVSDFRKDFQFYKVREINNYHHAHDAYLNAVVGTALIKKYPKLESEFVYGDYKVYDVRKMIAKSEQEIGKATAKYFFYSNIMNFFKTEITLANGEIRKRPLIETNGETGEIVWDKGRDFATVRKVLSMPQVNIVKKTEVQTGGFSKESILPKRNSDKLIARKKDWDPKKYGGFDSPTVAYSVLVVAKVEKGKSKKLKSVKELLGITIMERSSFEKNPIDFLEAKGYKEVKKDLIIKLPKYSLFELENGRKRMLASAGELQKGNELALPSKYVNFLYLASHYEKLKGS

SEQ ID NO: 58 - protein, 1387 aa, Artificial Sequence
  Synthetic
KPIREQAENIIHLFTLTNLGAPAAFKYFDTTIDRKRYTSTKEVLDATLIHQSITGLYETRIDLSQLGGDGGSGGSGGSGGSGGSGGSGGDKKYSIGLAIGTNSVGWAVITDEYKVPSKKFKVLGNTDRHSIKKNLIGALLFDSGETAEATRLKRTARRRYTRRKNRICYLQEIFSNEMAKVDDSFFHRLEESFLVEEDKKHERHPIFGNIVDEVAYHEKYPTIYHLRKKLVDSTDKADLRLIYLALAHMIKFRGHFLIEGDLNPDNSDVDKLFIQLVQTYNQLFEENPINASGVDAKAILSARLSKSRRLENLIAQLPGEKKNGLFGNLIALSLGLTPNFKSNFDLAEDAKLQLSKDTYDDDLDNLLAQIGDQYADLFLAAKNLSDAILLSDILRVNTEITKAPLSASMIKRYDEHHQDLTLLKALVRQQLPEKYKEIFFDQSKNGYAGYIDGGASQEEFYKFIKPILEKMDGTEELLVKLNREDLLRKQRTFDNGSIPHQIHLGELHAILRRQEDFYPFLKDNREKIEKILTFRIPYYVGPLARGNSRFAWMTRKSEETITPWNFEEVVDKGASAQSFIERMTNFDKNLPNEKVLPKHSLLYEYFTVYNELTKVKYVTEGMRKPAFLSGEQKKAIVDLLFKTNRKVTVKQLKEDYFKKIECFDSVEISGVEDRFNASLGTYHDLLKIIKDKDFLDNEENEDILEDIVLTLTLFEDREMIEERLKTYAHLFDDKVMKQLKRRRYTGWGRLSRKLINGIRDKQSGKTILDFLKSDGFANRNFMQLIHDDSLTFKEDIQKAQVSGQGDSLHEHIANLAGSPAIKKGILQTVKVVDELVKVMGRHKPENIVIEMARENQTTQKGQKNSRERMKRIEEGIKELGSQILKEHPVENTQLQNEKLYLYYLQNGRDMYVDQELDINRLSDYDVDHIVPQSFLKDDSIDNKVLTRSDKNRGKSDNVPSEEVVKKMKNYWRQLLNAKLITQRKFDNLTKAERGGLSELDKAGFIKRQLVETRQITKHVAQILDSRMNTKYDENDKLIREVKVITLKSKLVSDFRKDFQFYKVREINNYHHAHDAYLNAVVGTALIKKYPKLESEFVYGDYKVYDVRKMIAKSEQEIGKATAKYFFYSNIMNFFKTEITLANGEIRKRPLIETNGETGEIVWDKGRDFATVRKVLSMPQVNIVKKTEVQTGGFSKESILPKRNSDKLIARKKDWDPKKYGGFDSPTVAYSVLVVAKVEKGKSKKLKSVKELLGITIMERSSFEKNPIDFLEAKGYKEVKKDLIIKLPKYSLFELENGRKRMLASAGELQKGNELALPSKYVNFLYLASHYEKLKGSPEDNEQKQLFVEQHKHYLDEIIEQISEFSKRVILADANLDKVLSAYNKHRD

SEQ ID NO: 59 - protein, 357 aa, Artificial Sequence
  Synthetic
DYKVYDVRKMIAKSEQEIGKATAKYFFYSNIMNFFKTEITLANGEIRKRPLIETNGETGEIVWDKGRDFATVRKVLSMPQVNIVKKTEVQTGGFSKESILPKRNSDKLIARKKDWDPKKYGGFDSPTVAYSVLVVAKVEKGKSKKLKSVKELLGITIMERSSFEKNPIDFLEAKGYKEVKKDLIIKLPKYSLFELENGRKRMLASAGELQKGNELALPSKYVNFLYLASHYEKLKGSPEDNEQKQLFVEQHKHYLDEIIEQISEFSKRVILADANLDKVLSAYNKHRDKPIREQAENIIHLFTLTNLGAPAAFKYFDTTIDRKRYTSTKEVLDATLIHQSITGLYETRIDLSQLGGD

SEQ ID NO: 60 - protein, 341 aa, Artificial Sequence
  Synthetic
EIGKATAKYFFYSNIMNFFKTEITLANGEIRKRPLIETNGETGEIVWDKGRDFATVRKVLSMPQVNIVKKTEVQTGGFSKESILPKRNSDKLIARKKDWDPKKYGGFDSPTVAYSVLVVAKVEKGKSKKLKSVKELLGITIMERSSFEKNPIDFLEAKGYKEVKKDLIIKLPKYSLFELENGRKRMLASAGELQKGNELALPSKYVNFLYLASHYEKLKGSPEDNEQKQLFVEQHKHYLDEIIEQISEFSKRVILADANLDKVLSAYNKHRDKPIREQAENIIHLFTLTNLGAPAAFKYFDTTIDRKRYTSTKEVLDATLIHQSITGLYETRIDLSQLGGD

SEQ ID NO: 61 - protein, 328 aa, Artificial Sequence
  Synthetic
NIMNFFKTEITLANGEIRKRPLIETNGETGEIVWDKGRDFATVRKVLSMPQVNIVKKTEVQTGGFSKESILPKRNSDKLIARKKDWDPKKYGGFDSPTVAYSVLVVAKVEKGKSKKLKSVKELLGITIMERSSFEKNPIDFLEAKGYKEVKKDLIIKLPKYSLFELENGRKRMLASAGELQKGNELALPSKYVNFLYLASHYEKLKGSPEDNEQKQLFVEQHKHYLDEIIEQISEFSKRVILADANLDKVLSAYNKHRDKPIREQAENIIHLFTLTNLGAPAAFKYFDTTIDRKRYTSTKEVLDATLIHQSITGLYETRIDLSQLGGD

SEQ ID NO: 62 - protein, 120 aa, Artificial Sequence
  Synthetic
PEDNEQKQLFVEQHKHYLDEIIEQISEFSKRVILADANLDKVLSAYNKHRDKPIREQAENIIHLFTLTNLGAPAAFKYFDTTIDRKRYTSTKEVLDATLIHQSITGLYETRIDLSQLGGD

SEQ ID NO: 63 - protein, 69 aa, Artificial Sequence
  Synthetic
KPIREQAENIIHLFTLTNLGAPAAFKYFDTTIDRKRYTSTKEVLDATLIHQSITGLYETRIDLSQLGGD

SEQ ID NO: 64 - protein, 1367 aa, Artificial Sequence
  Synthetic
DKKYSIGLDIGTNSVGWAVITDEYKVPSKKFKVLGNTDRHSIKKNLIGALLFDSGETAEATRLKRTARRRYTRRKNRICYLQEIFSNEMAKVDDSFFHRLEESFLVEEDKKHERHPIFGNIVDEVAYHEKYPTIYHLRKKLVDSTDKADLRLIYLALAHMIKFRGHFLIEGDLNPDNSDVDKLFIQLVQTYNQLFEENPINASGVDAKAILSARLSKSRRLENLIAQLPGEKKNGLFGNLIALSLGLTPNFKSNFDLAEDAKLQLSKDTYDDDLDNLLAQIGDQYADLFLAAKNLSDAILLSDILRVNTEITKAPLSASMIKRYDEHHQDLTLLKALVRQQLPEKYKEIFFDQSKNGYAGYIDGGASQEEFYKFIKPILEKMDGTEELLVKLNREDLLRKQRTFDNGSIPHQIHLGELHAILRRQEDFYPFLKDNREKIEKILTFRIPYYVGPLARGNSRFAWMTRKSEETITPWNFEEVVDKGASAQSFIERMTNFDKNLPNEKVLPKHSLLYEYFTVYNELTKVKYVTEGMRKPAFLSGEQKKAIVDLLFKTNRKVTVKQLKEDYFKKIECFDSVEISGVEDRFNASLGTYHDLLKIIKDKDFLDNEENEDILEDIVLTLTLFEDREMIEERLKTYAHLFDDKVMKQLKRRRYTGWGRLSRKLINGIRDKQSGKTILDFLKSDGFANRNFMQLIHDDSLTFKEDIQKAQVSGQGDSLHEHIANLAGSPAIKKGILQTVKVVDELVKVMGRHKPENIVIEMARENQTTQKGQKNSRERMKRIEEGIKELGSQILKEHPVENTQLQNEKLYLYYLQNGRDMYVDQELDINRLSDYDVDAIVPQSFLKDDSIDNKVLTRSDKNRGKSDNVPSEEVVKKMKNYWRQLLNAKLITQRKFDNLTKAERGGLSELDKAGFIKRQLVETRQITKHVAQILDSRMNTKYDENDKLIREVKVITLKSKLVSDFRKDFQFYKVREINNYHHAHDAYLNAVVGTALIKKYPKLESEFVYGDYKVYDVRKMIAKSEQEIGKATAKYFFYSNIMNFFKTEITLANGEIRKRPLIETNGETGEIVWDKGRDFATVRKVLSMPQVNIVKKTEVQTGGFSKESILPKRNSDKLIARKKDWDPKKYGGFVSPTVAYSVLVVAKVEKGKSKKLKSVKELLGITIMERSSFEKNPIDFLEAKGYKEVKKDLIIKLPKYSLFELENGRKRMLASARELQKGNELALPSKYVNFLYLASHYEKLKGSPEDNEQKQLFVEQHKHYLDEIIEQISEFSKRVILADANLDKVLSAYNKHRDKPIREQAENIIHLFTLTNLGAPAAFKYFDTTIDRKQYRSTKEVLDATLIHQSITGLYETRIDLSQLGGD

SEQ ID NO: 65 - protein, 1367 aa, Artificial Sequence
  Synthetic
DKKYSIGLDIGTNSVGWAVITDEYKVPSKKFKVLGNTDRHSIKKNLIGALLFDSGETAEATRLKRTARRRYTRRKNRICYLQEIFSNEMAKVDDSFFHRLEESFLVEEDKKHERHPIFGNIVDEVAYHEKYPTIYHLRKKLVDSTDKADLRLIYLALAHMIKFRGHFLIEGDLNPDNSDVDKLFIQLVQTYNQLFEENPINASGVDAKAILSARLSKSRRLENLIAQLPGEKKNGLFGNLIALSLGLTPNFKSNFDLAEDAKLQLSKDTYDDDLDNLLAQIGDQYADLFLAAKNLSDAILLSDILRVNTEITKAPLSASMIKRYDEHHQDLTLLKALVRQQLPEKYKEIFFDQSKNGYAGYIDGGASQEEFYKFIKPILEKMDGTEELLVKLNREDLLRKQRTFDNGSIPHQIHLGELHAILRRQEDFYPFLKDNREKIEKILTFRIPYYVGPLARGNSRFAWMTRKSEETITPWNFEEVVDKGASAQSFIERMTNFDKNLPNEKVLPKHSLLYEYFTVYNELTKVKYVTEGMRKPAFLSGEQKKAIVDLLFKTNRKVTVKQLKEDYFKKIECFDSVEISGVEDRFNASLGTYHDLLKIIKDKDFLDNEENEDILEDIVLTLTLFEDREMIEERLKTYAHLFDDKVMKQLKRRRYTGWGRLSRKLINGIRDKQSGKTILDFLKSDGFANRNFMQLIHDDSLTFKEDIQKAQVSGQGDSLHEHIANLAGSPAIKKGILQTVKVVDELVKVMGRHKPENIVIEMARENQTTQKGQKNSRERMKRIEEGIKELGSQILKEHPVENTQLQNEKLYLYYLQNGRDMYVDQELDINRLSDYDVDAIVPQSFLKDDSIDNKVLTRSDKNRGKSDNVPSEEVVKKMKNYWRQLLNAKLITQRKFDNLTKAERGGLSELDKAGFIKRQLVETRQITKHVAQILDSRMNTKYDENDKLIREVKVITLKSKLVSDFRKDFQFYKVREINNYHHAHDAYLNAVVGTALIKKYPKLESEFVYGDYKVYDVRKMIAKSEQEIGKATAKYFFYSNIMNFFKTEITLANGEIRKRPLIETNGETGEIVWDKGRDFATVRKVLSMPQVNIVKKTEVQTGGFSKESILPKRNSDKLIARKKDWDPKKYGGFVSPTVAYSVLVVAKVEKGKSKKLKSVKELLGITIMERSSFEKNPIDFLEAKGYKEVKKDLIIKLPKYSLFELENGRKRMLASARELQKGNELALPSKYVNFLYLASHYEKLKGSPEDNEQKQLFVEQHKHYLDEIIEQISEFSKRVILADANLDKVLSAYNKHRDKPIREQAENIIHLFTLTNLGAPAAFKYFDTTIDRKEYRSTKEVLDATLIHQSITGLYETRIDLSQLGGD

SEQ ID NO: 66 - protein, 1300 aa, Francisella novicida
MSIYQEFVNKYSLSKTLRFELIPQGKTLENIKARGLILDDEKRAKDYKKAKQIIDKYHQFFIEEILSSVCISEDLLQNYSDVYFKLKKSDDDNLQKDFKSAKDTIKKQISEYIKDSEKFKNLFNQNLIDAKKGQESDLILWLKQSKDNGIELFKANSDITDIDEALEIIKSFKGWTTYFKGFHENRKNVYSSNDIPTSIIYRIVDDNLPKFLENKAKYESLKDKAPEAINYEQIKKDLAEELTFDIDYKTSEVNQRVFSLDEVFEIANFNNYLNQSGITKFNTIIGGKFVNGENTKRKGINEYINLYSQQINDKTLKKYKMSVLFKQILSDTESKSFVIDKLEDDSDVVTTMQSFYEQIAAFKTVEEKSIKETLSLLFDDLKAQKLDLSKIYFKNDKSLTDLSQQVFDDYSVIGTAVLEYITQQIAPKNLDNPSKKEQELIAKKTEKAKYLSLETIKLALEEFNKHRDIDKQCRFEEILANFAAIPMIFDEIAQNKDNLAQISIKYQNQGKKDLLQASAEDDVKAIKDLLDQTNNLLHKLKIFHISQSEDKANILDKDEHFYLVFEECYFELANIVPLYNKIRNYITQKPYSDEKFKLNFENSTLANGWDKNKEPDNTAILFIKDDKYYLGVMNKKNNKIFDDKAIKENKGEGYKKIVYKLLPGANKMLPKVFFSAKSIKFYNPSEDILRIRNHSTHTKNGSPQKGYEKFEFNIEDCRKFIDFYKQSISKHPEWKDFGFRFSDTQRYNSIDEFYREVENQGYKLTFENISESYIDSVVNQGKLYLFQIYNKDFSAYSKGRPNLHTLYWKALFDERNLQDVVYKLNGEAELFYRKQSIPKKITHPAKEAIANKNKDNPKKESVFEYDLIKDKRFTEDKFFFHCPITINFKSSGANKFNDEINLLLKEKANDVHILSIDRGERHLAYYTLVDGKGNIIKQDTFNIIGNDRMKTNYHDKLAAIEKDRDSARKDWKKINNIKEMKEGYLSQVVHEIAKLVIEYNAIVVFEDLNFGFKRGRFKVEKQVYQKLEKMLIEKLNYLVFKDNEFDKTGGVLRAYQLTAPFETFKKMGKQTGIIYYVPAGFTSKICPVTGFVNQLYPKYESVSKSQEFFSKFDKICYNLDKGYFEFSFDYKNFGDKAAKGKWTIASFGSRLINFRNSDKNHNWDTREVYPTKELEKLLKDYSIEYGHGECIKAAICGESDKKFFAKLTSVLNTILQMRNSKTGTELDYLISPVADVNGNFFDSRQAPKNMPQDADANGAYHIGLKGLMLLGRIKNNQEGKKLNLVIKNEEYFEFVQNRNN

SEQ ID NO: 67 - protein, 887 aa, Natronobacterium gregoryi
MTVIDLDSTTTADELTSGHTYDISVTLTGVYDNTDEQHPRMSLAFEQDNGERRYITLWKNTTPKDVFTYDYATGSTYIFTNIDYEVKDGYENLTATYQTTVENATAQEVGTTDEDETFAGGEPLDHHLDDALNETPDDAETESDSGHVMTSFASRDQLPEWTLHTYTLTATDGAKTDTEYARRTLAYTVRQELYTDHDAAPVATDGLMLLTPEPLGETPLDLDCGVRVEADETRTLDYTTAKDRLLARELVEEGLKRSLWDDYLVRGIDEVLSKEPVLTCDEFDLHERYDLSVEVGHSGRAYLHINFRHRFVPKLTLADIDDDNIYPGLRVKTTYRPRRGHIVWGLRDECATDSLNTLGNQSVVAYHRNNQTPINTDLLDAIEAADRRVVETRRQGHGDDAVSFPQELLAVEPNTHQIKQFASDGFHQQARSKTRLSASRCSEKAQAFAERLDPVRLNGSTVEFSSEFFTGNNEQQLRLLYENGESVLTFRDGARGAHPDETFSKGIVNPPESFEVAVVLPEQQADTCKAQWDTMADLLNQAGAPPTRSETVQYDAFSSPESISLNVAGAIDPSEVDAAFVVLPPDQEGFADLASPTETYDELKKALANMGIYSQMAYFDRFRDAKIFYTRNVALGLLAAAGGVAFTTEHAMPGDADMFIGIDVSRSYPEDGASGQINIAATATAVYKDGTILGHSSTRPQLGEKLQSTDVRDIMKNAILGYQQVTGESPTHIVIHRDGFMNEDLDPATEFLNEQGVEYDIVEIRKQPQTRLLAVSDVQYDTPVKSIAAINQNEPRATVATFGAPEYLATRDGGGLPRPIQIERVAGETDIETLTRQVYLLSQSHIQVHNSTARLPITTAYADQASTHATKGYLVQTGAFESNVGFL

SEQ ID NO: 68 - DNA, 10 bp, Artificial Sequence
  Synthetic
gttttaaaac

SEQ ID NO: 69 - protein, 560 aa, Unknown
  moloney murine leukemia virus
  misc_feature (229)..(229): Xaa can be any naturally occurring amino acid
AFPLERPDWDYTTQAGRNHLVHYRQLLLAGLQNAGRSPTNLAKVKGITQGPNESPSAFLERLKEAYRRYTPYDPEDPGQETNVSMSFIWQSAPDIGRKLGRLEDLKSKTLGDLVREAEKIFNKRETPEEREERIRRETEEKEERRRTVDEQKEKERDRRRHREMSKLLATVVIGQEQDRQEGERKRPQLDKDQCAYCKEKGHWAKDCPKKPRGPRGPRPQTSLLTLGDXGGQGQDPPPEPRITLKVGGQPVTFLVDTGAQHSVLTQNPGPLSDKSAWVQGATGGKRYRWTTDRKVHLATGKVTHSFLHVPDCPYPLLGRDLLTKLKAQIHFEGSGAQVVGPMGQPLQVLTLNIEDEYRLHETSKEPDVSLGFTWLSDFPQAWAESGGMGLAVRQAPLIIPLKATSTPVSIKQYPMSQEARLGIKPHIQRLLDQGILVPCQSPWNTPLLPVKKPGTNDYRPVQDLREVNKRVEDIHPTVPNPYNLLSGLPPSHQWYTVLDLKDAFFCLRLHPTSQPLFAFEWRDPEMGISGQLTWTRLPQGFKNSPTLFDEALHRDLADFR

SEQ ID NO: 70 - protein, 669 aa, Feline leukemia virus
TLQLEEEYRLFEPESTQKQEMDIWLKNFPQAWAETGGMGTAHCQAPVLIQLKATATPISIRQYPMPHEAYQGIKPHIRRMLDQGILKPCQSPWNTPLLPVKKPGTEDYRPVQDLREVNKRVEDIHPTVPNPYNLLSTLPPSHPWYTVLDLKDAFFCLRLHSESQLLFAFEWRDPEIGLSGQLTWTRLPQGFKNSPTLFDEALHSDLADFRVRYPALVLLQYVDDLLLAAATRTECLEGTKALLETLGNKGYRASAKKAQICLQEVTYLGYSLKDGQRWLTKARKEAILSIPVPKNSRQVREFLGTAGYCRLWIPGFAELAAPLYPLTRPGTLFQWGTEQQLAFEDIKKALLSSPALGLPDITKPFELFIDENSGFAKGVLVQKLGPWKRPVAYLSKKLDTVASGWPPCLRMVAAIAILVKDAGKLTLGQPLTILTSHPVEALVRQPPNKWLSNARMTHYQAMLLDAERVHFGPTVSLNPATLLPLPSGGNHHDCLQILAETHGTRPDLTDQPLPDADLTWYTDGSSFIRNGEREAGAAVTTESEVIWAAPLPPGTSAQRAELIALTQALKMAEGKKLTVYTDSRYAFATTHVHGEIYRRRGLLTSEGKEIKNKNEILALLEALFLPKRLSIIHCPGHQKGDSPQAKGNRLADDTAKKAATETHSSLTVL

SEQ ID NO: 71 - protein, 559 aa, Artificial Sequence
  Synthetic
  misc_feature (280)..(280): Xaa can be any naturally occurring amino acid
PISPIETVPVKLKPGMDGPKVKQWPLTEEKIKALVEICTEMEKEGKISKIGPENPYNTPVFAIKKKDSTKWRKLVDFRELNKRTQDFWEVQLGIPHPAGLKKKKSVTVLDVGDAYFSVPLDEDFRKYTAFTIPSINNETPGIRYQYNVLPQGWKGSPAIFQSSMTKILEPFRKQNPDIVIYQYMDDLYVGSDLEIGQHRTKIEELRQHLLRWGLTTPDKKHQKEPPFLWMGYELHPDKWTVQPIVLPEKDSWTVNDIQKLVGKLNWASQIYPGIKVRQLXKLLRGTKALTEVIPLTEEAELELAENREILKEPVHGVYYDPSKDLIAEIQKQGQGQWTYQIYQEPFKNLKTGKYARMRGAHTNDVKQLTEAVQKITTESIVIWGKTPKFKLPIQKETWETWWTEYWQATWIPEWEFVNTPPLVKLWYQLEKEPIVGAETFYVDGAANRETKLGKAGYVTNRGRQKVVTLTDTTNQKTELQAIYLALQDSGLEVNIVTDSQYALGIIQAQPDQSESELVNQIIEQLIKKEKVYLAWVPAHKGIGGNEQVDKLVSAGIRKV

SEQ ID NO: 72 - protein, 440 aa, Artificial Sequence
  Synthetic
PISPIETVPVKLKPGMDGPKVKQWPLTEEKIKALVEICTEMEKEGKISKIGPENPYNTPVFAIKKKDSTKWRKLVDFRELNKRTQDFWEVQLGIPHPAGLKKKKSVTVLDVGDAYFSVPLDEDFRKYTAFTIPSINNETPGIRYQYNVLPQGWKGSPAIFQSSMTKILEPFRKQNPDIVIYQYMDDLYVGSDLEIGQHRTKIEELRQHLLRWGLTTPDKKHQKEPPFLWMGYELHPDKWTVQPIVLPEKDSWTVNDIQKLVGKLNWASQIYPGIKVRQLCKLLRGTKALTEVIPLTEEAELELAENREILKEPVHGVYYDPSKDLIAEIQKQGQGQWTYQIYQEPFKNLKTGKYARMRGAHTNDVKQLTEAVQKITTESIVIWGKTPKFKLPIQKETWETWWTEYWQATWIPEWEFVNTPPLVKLWYQLEKEPIVGAETF

SEQ ID NO: 73 - protein, 858 aa, Rous sarcoma virus
TVALHLAIPLKWKPNHTPVWIDQWPLPEGKLVALTQLVEKELQLGHIEPSLSCWNTPVFVIRKASGSYRLLHDLRAVNAKLVPFGAVQQGAPVLSALPRGWPLMVLDLKDCFFSIPLAEQDREAFAFTLPSVNNQAPARRFQWKVLPQGMTCSPTICQLIVGQILEPLRLKHPSLRMLHYMDDLLLAASSHDGLEAAGEEVISTLERAGFTISPDKVQKEPGVQYLGYKLGSTYAAPVGLVAEPRIATLWDVQKLVGSLQWLRPALGIPPRLRGPFYEQLRGSDPNEAREWNLDMKMAWREIVQLSTTAALERWDPALPLEGAVARCEQGAIGVLGQGLSTHPRPCLWLFSTQPTKAFTAWLEVLTLLITKLRASAVRTFGKEVDILLLPACFRDELPLPEGILLALRGFAGKIRSSDTPSIFDIARPLHVSLKVRVTDHPVPGPTVFTDASSSTHKGVVVWREGPRWEIKEIADLGASVQQLEARAVAMALLLWPTTPTNVVTDSAFVAKMLLKMGQEGVPSTAAAFILEDALSQRSAMAAVLHVRSHSEVPGFFTEGNDVADSQATFQAYPLREAKDLHTALHIGPRALSKACNISMQQAREVVQTCPHCNSAPALEAGVNPRGLGPLQIWQTDFTLEPRMAPRSWLAVTVDTASSAIVVTQHGRVTSVAAQHHWATVIAVLGRPKAIKTDNGSCFTSKSTREWLARWGIAHTTGIPGNSQGQAMVERANRLLKDKIRVLAEGDGFMKRIPTSKQGELLAKAMYALNHFERGENTKTPIQKHWRPTVLTEGPPVKIRIETGEWEKGWNVLVWGRGYAAVKNRDTDKVIWVPSRKVKPDIAQKDEVTKKDEASPLFA

SEQ ID NO: 74 - protein, 675 aa, Cauliflower mosaic virus
MMDHLLQKTQIQNQTEQVMNITNPNSIYIKGRLYFKGYKKIELHCFVDTGASLCIASKFVIPEEHWINAERPIMVKIADGSSITINKVCRDIDLIIAGEIFHIPTVYQQESGIDFIIGNNFCQLYEPFIQFTDRVIFTKDRTYPVHIAKLTRAVRVGTEGFLESMKKRSKTQQPEPVNISTNKIAILSEGRRLSEEKLFITQQRMQKIEELLEKVCSENPLDPNKTKQWMKASIKLSDPSKAIKVKPMKYSPMDREEFDKQIKELLDLKVIKPSKSPHMAPAFLVNNEAEKRRGKKRMVVNYKAMNKATVGDAYNLPNKDELLTLIRGKKIFSSFDCKSGFWQVLLDQDSRPLTAFTCPQGHYEWNVVPFGLKQAPSIFQRHMDEAFRVFRKFCCVYVDDILVFSNNEEDHLLHVAMILQKCNQHGIILSKKKAQLFKKKINFLGLEIDEGTHKPQGHILEHINKFPDTLEDKKQLQRFLGILTYASDYIPKLAQIRKPLQAKLKENVPWKWTKEDTLYMQKVKKNLQGFPPLHHPLPEEKLIIETDASDDYWGGMLKAIKINEGTNTELICRYASGSFKAAEKNYHSNDKETLAVINTIKKFSIYLTPVHFLIRTDNTHFKSFVNLNYKGDSKLGRNIRWQAWLSHYSFDVEHIKGTDNHFADFLSREFNRVNS

SEQ ID NO: 75 - protein, 366 aa, Klebsiella pneumoniae
MKEKISKIDKNFYTDIFIKTSFQNEFEAGGVIPPIAKNQVSTISNKNKTFYSLAHSSPHYSIQTRIEKFLLKNIPLSASSFAFRKERSYLHYLEPHTQNVKYCHLDIVSFFHSIDVNIVRDTFSVYFSDEFLVKEKQSLLDAFMASVTLTAELDGVEKTFIPMGFKSSPSISNIIFRKIDILIQKFCDKNKITYTRYADDLLFSTKKENNILSSTFFINEISSILSINKFKLNKSKYLYKEGTISLGGYVIENILKDNSSGNIRLSSSKLNPLYKALYEIKKGSSSKHICIKVFNLKLKRFIYKKNKEKFEAKFYSSQLKNKLLGYRSYLLSFVIFHKKYKCINPIFLEKCVFLISEIESIMNRKF

SEQ ID NO: 76 - protein, 263 aa, Escherichia coli
MKITSNNVTAVINGKGWHSINWKKCHQHVKTIQTRIAKAACNQQWRTVGRLQRLLVRSFSARALAVKRVTENSGRKTPGVDGQIWSTPESKWEAIFKLRRKGYKPLPLKRVFIPKSNGKKRPLGIPVMLDRAMQALHLLGLEPVSETNADHNSYGFRPARCTADAIQQVCNMYSSRNASKWVLEGDIKGCFEHISHEWLLENIPMDKQILRNWLKAGIIEKSIFSKTLSGTPQGGIISPVLANMALDGLERLLQNRFGRNRLI

SEQ ID NO: 77 - protein, 438 aa, Bacillus subtilis
MSKIKINYEKYHIKPFPHFDQRIKVNKKVKENLQNPFYIAAHSFYPFIHYKKISYKFKNGTLSSPKERDIFYSGHMDGYIYKHYGEILNHKYNNTCIGKGIDHVSLAYRNNKMGKSNIHFAAEVINFISEQQQAFIFVSDFSSYFDSLDHAILKEKLIEVLEEQDKLSKDWWNVFKHITRYNWVEKEEVISDLECTKEKIARDKKSRERYYTPAEFREFRKRVNIKSNDTGVGIPQGTAISAVLANVYAIDLDQKLNQYALKYGGIYRRYSDDIIMVLPMTSDGQDPSNDHVSFIKSVVKRNKVTMGDSKTSVLYYANNNIYEDYQRKRESKMDYLGFSFDGMTVKIREKSLFKYYHRTYKKINSINWASVKKEKKVGRKKLYLLYSHLGRNYKGHGNFISYCKKAHAVFEGNKKIESLINQQIKRHWKKIQKRLVDV

SEQ ID NO: 78 - protein, 426 aa, Artificial Sequence
  Synthetic
DTSNLMEQILSSDNLNRAYLQVVRNKGAEGVDGMKYTELKEHLAKNGETIKGQLRTRKYKPQPARRVEIPKPDGGVRNLGVPTVTDRFIQQAIAQVLTPIYEEQFHDHSYGFRPNRCAQQAILTALNIMNDGNDWIVDIDLEKFFDTVNHDKLMTLIGRTIKDGDVISIVRKYLVSGIMIDDEYEDSIVGTPQGGNLSPLLANIMLNELDKEMEKRGLNFVRYADDCIIMVGSEMSANRVMRNISRFIEEKLGLKVNMTKSKVDRPSGLKYLGFGFYFDPRAHQFKAKPHAKSVAKFKKRMKELTCRSWGVSNSYKVEKLNQLIRGWINYFKIGSMKTLCKELDSRIRYRLRMCIWKQWKTPQNQEKNLVKLGIDRNTARRVAYTGKRIAYVCNKGAVNVAISNKRLASFGLISMLDYYIEKCVTC

SEQ ID NO: 79 - protein, 412 aa, Artificial Sequence
  Synthetic
ALLERILARDNLITALKRVEANQGAPGIDGVSTDQLRDYIRAHWSTIHAQLLAGTYRPAPVRRVEIPKPGGGTRQLGIPTVVDRLIQQAILQELTPIFDPDFSSSSFGFRPGRNAHDAVRQAQGYIQEGYRYVVDMDLEKFFDRVNHDILMSRVARKVKDKRVLKLIRAYLQAGVMIEGVKVQTEEGTPQGGPLSPLLANILLDDLDKELEKRGLKFCRYADDCNIYVKSLRAGQRVKQSIQRFLEKTLKLKVNEEKSAVDRPWKRAFLGFSFTPERKARIRLAPRSIQRLKQRIRQLTNPNWSISMPERIHRVNQYVMGWIGYFRLVETPSVLQTIEGWIRRRLRLCQWLQWKRVRTRIRELRALGLKETAVMEIANTRKGAWRTTKTPQLHQALGKTYWTAQGLKSLTQR

SEQ ID NO: 80 - protein, 503 aa, Artificial Sequence
  Synthetic
TLNIEDEYRLHETSKEPDVSLGSTWLSDFPQAWAETGGMGLAVRQAPLIIPLKATSTPVSIKQYPMSQEARLGIKPHIQRLLDQGILVPCQSPWNTPLLPVKKPGTNDYRPVQDLREVNKRVEDIHPTVPNPYNLLSGLPPSHQWYTVLDLKDAFFCLRLHPTSQPLFAFEWRDPEMGISGQLTWTRLPQGFKNSPTLFNEALHRDLADFRIQHPDLILLQYVDDLLLAATSELDCQQGTRALLQTLGNLGYRASAKKAQICQKQVKYLGYLLKEGQRWLTEARKETVMGQPTPKTPRQLREFLGKAGFCRLFIPGFAEMAAPLYPLTKPGTLFNWGPDQQKAYQEIKQALLTAPALGLPDLTKPFELFVDEKQGYAKGVLTQKLGPWRRPVAYLSKKLDPVAAGWPPCLRMVAAIAVLTKDAGKLTMGQPLVILAPHAVEALVKQPPDRWLSNARMTHYQALLLDTDRVQFGPVVALNPATLLPLPEEGLQHNCLDNSRLIN

SEQ ID NO: 81 - protein, 677 aa, Unknown
  moloney murine leukemia virus
TLNIEDEYRLHETSKEPDVSLGSTWLSDFPQAWAETGGMGLAVRQAPLIIPLKATSTPVSIKQYPMSQEARLGIKPHIQRLLDQGILVPCQSPWNTPLLPVKKPGTNDYRPVQDLREVNKRVEDIHPTVPNPYNLLSGLPPSHQWYTVLDLKDAFFCLRLHPTSQPLFAFEWRDPEMGISGQLTWTRLPQGFKNSPTLFDEALHRDLADFRIQHPDLILLQYVDDLLLAATSELDCQQGTRALLQTLGNLGYRASAKKAQICQKQVKYLGYLLKEGQRWLTEARKETVMGQPTPKTPRQLREFLGTAGFCRLWIPGFAEMAAPLYPLTKTGTLFNWGPDQQKAYQEIKQALLTAPALGLPDLTKPFELFVDEKQGYAKGVLTQKLGPWRRPVAYLSKKLDPVAAGWPPCLRMVAAIAVLTKDAGKLTMGQPLVILAPHAVEALVKQPPDRWLSNARMTHYQALLLDTDRVQFGPVVALNPATLLPLPEEGLQHNCLDILAEAHGTRPDLTDQPLPDADHTWYTDGSSLLQEGQRKAGAAVTTETEVIWAKALPAGTSAQRAELIALTQALKMAEGKKLNVYTDSRYAFATAHIHGEIYRRRGLLTSEGKEIKNKDEILALLKALFLPKRLSIIHCPGHQKGHSAEARGNRMADQAARKAAITETPDTSTLLIENSSP

SEQ ID NO: 82 - protein, 677 aa, Artificial Sequence
  Synthetic
TLNIEDEYRLHETSKEPDVSLGSTWLSDFPQAWAETGGMGLAVRQAPLIIPLKATSTPVSIKQYPMSQEARLGIKPHIQRLLDQGILVPCQSPWNTPLLPVKKPGTNDYRPVQDLREVNKRVEDIHPTVPNPYNLLSGLPPSHQWYTVLDLKDAFFCLRLHPTSQPLFAFEWRDPEMGISGQLTWTRLPQGFKNSPTLFNEALHRDLADFRIQHPDLILLQYVDDLLLAATSELDCQQGTRALLQTLGNLGYRASAKKAQICQKQVKYLGYLLKEGQRWLTEARKETVMGQPTPKTPRQLREFLGTAGFCRLWIPGFAEMAAPLYPLTKTGTLFNWGPDQQKAYQEIKQALLTAPALGLPDLTKPFELFVDEKQGYAKGVLTQKLGPWRRPVAYLSKKLDPVAAGWPPCLRMVAAIAVLTKDAGKLTMGQPLVILAPHAVEALVKQPPDRWLSNARMTHYQALLLDTDRVQFGPVVALNPATLLPLPEEGLQHNCLDILAEAHGTRPDLTDQPLPDADHTWYTDGSSLLQEGQRKAGAAVTTETEVIWAKALPAGTSAQRAELIALTQALKMAEGKKLNVYTDSRYAFATAHIHGEIYRRRGLLTSEGKEIKNKDEILALLKALFLPKRLSIIHCPGHQKGHSAEARGNRMADQAARKAAITETPDTSTLLIENSSP

SEQ ID NO: 83 - protein, 677 aa, Artificial Sequence
  Synthetic
TLNIEDEYRLHETSKEPDVSLGSTWLSDFPQAWAETGGMGLAVRQAPLIIPLKATSTPVSIKQYPMSQEARLGIKPHIQRLLDQGILVPCQSPWNTPLLPVKKPGTNDYRPVQDLREVNKRVEDIHPTVPNPYNLLSGLPPSHQWYTVLDLKDAFFCLRLHPTSQPLFAFEWRDPEMGISGQLTWTRLPQGFKNSPTLFNEALHRDLADFRIQHPDLILLQYVDDLLLAATSELDCQQGTRALLQTLGNLGYRASAKKAQICQKQVKYLGYLLKEGQRWLTEARKETVMGQPTPKTPRQLREFLGTAGFCRLWIPGFAEMAAPLYPLTKPGTLFNWGPDQQKAYQEIKQALLTAPALGLPDLTKPFELFVDEKQGYAKGVLTQKLGPWRRPVAYLSKKLDPVAAGWPPCLRMVAAIAVLTKDAGKLTMGQPLVILAPHAVEALVKQPPDRWLSNARMTHYQALLLDTDRVQFGPVVALNPATLLPLPEEGLQHNCLDILAEAHGTRPDLTDQPLPDADHTWYTDGSSLLQEGQRKAGAAVTTETEVIWAKALPAGTSAQRAELIALTQALKMAEGKKLNVYTDSRYAFATAHIHGEIYRRRGLLTSEGKEIKNKDEILALLKALFLPKRLSIIHCPGHQKGHSAEARGNRMADQAARKAAITETPDTSTLLIENSSP

SEQ ID NO: 84 - protein, 677 aa, Artificial Sequence
  Synthetic
TLNIEDEYRLHETSKEPDVSLGSTWLSDFPQAWAETGGMGLAVRQAPLIIPLKATSTPVSIKQYPMSQEARLGIKPHIQRLLDQGILVPCQSPWNTPLLPVKKPGTNDYRPVQDLREVNKRVEDIHPTVPNPYNLLSGLPPSHQWYTVLDLKDAFFCLRLHPTSQPLFAFEWRDPEMGISGQLTWTRLPQGFKNSPTLFNEALHRDLADFRIQHPDLILLQYVDDLLLAATSELDCQQGTRALLQTLGNLGYRASAKKAQICQKQVKYLGYLLKEGQRWLTEARKETVMGQPTPKTPRQLREFLGTAGFCRLWIPGFAEMAAPLYPLTKPGTLFNWGPDQQKAYQEIKQALLTAPALGLPDLTKPFELFVDEKQGYAKGVLTQKLGPWRRPVAYLSKKLDPVAAGWPPCLRMVAAIAVLTKDAGKLTMGQPLVILAPHAVEALVKQPPDRWLSNARMTHYQALLLDTDRVQFGPVVALNPATLLPLPEEGLQHNCLDILAEAHGTRPDLTDQPLPDADHTWYTDGSSLLQEGQRKAGAAVTTETEVIWAKALPAGTSAQRAELIALTQALKMAEGKKLNVYTDSRYAFATAHIHGEIYRRRGWLTSEGKEIKNKDEILALLKALFLPKRLSIIHCPGHQKGHSAEARGNRMADQAARKAAITETPDTSTLLIENSSP

SEQ ID NO: 85 - protein, 677 aa, Artificial Sequence
  Synthetic
TLNIEDEYRLHETSKEPDVSLGSTWLSDFPQAWAETGGMGLAVRQAPLIIPLKATSTPVSIKQYPMSQKARLGIKPHIQRLLDQGILVPCQSPWNTPLLPVKKPGTNDYRPVQDLREVNKRVEDIHPTVPNPYNLLSGLPPSHQWYTVLDLKDAFFCLRLHPTSQPLFAFEWRDPEMGISGQLTWTRLPQGFKNSPTLFNEALHRDLADFRIQHPDLILLQYVDDLLLAATSELDCQQGTRALLQTLGNLGYRASAKKAQICQKQVKYLGYLLKEGQRWLTEARKETVMGQPTPKTPRQLREFLGTAGFCRLWIPGFAEMAAPLYPLTKPGTLFNWGPDQQKAYQEIKQALLTAPALGLPDLTKPFELFVDEKQGYAKGVLTQKLGPWRRPVAYLSKKLDPVAAGWPPCLRMVAAIAVLTKDAGKLTMGQPLVILAPHAVEALVKQPPDRWLSNARMTHYQALLLDTDRVQFGPVVALNPATLLPLPEEGLQHNCLDILAEAHGTRPDLTDQPLPDADHTWYTDGSSLLQEGQRKAGAAVTTETEVIWAKALPAGTSAQRAELIALTQALKMAEGKKLNVYTDSRYAFATAHIHGEIYRRRGWLTSEGKEIKNKDEILALLKALFLPKRLSIIHCPGHQKGHSAEARGNRMADQAARKAAITETPDTSTLLIENSSP

SEQ ID NO: 86 - protein, 677 aa, Artificial Sequence
  Synthetic
TLNIEDEYRLHETSKEPDVSLGSTWLSDFPQAWAETGGMGLAVRQAPLIIPLKATSTPVSIKQYPMSQEARLGIKPHIQRLLDQGILVPCQSPWNTPLLPVKKPGTNDYRPVQDLREVNKRVEDIHPTVPNPYNLLSGLPPSHQWYTVLDLKDAFFCLRLHPTSQPLFAFEWRDPEMGISGQLTWTRLPQGFKNSPTLFNEALHRDLADFRIQHPDLILLQYVDDLLLAATSELDCQQGTRALLQTLGNLGYRASAKKAQICQKQVKYLGYLLKEGQRWLTEARKETVMGQPTPKTPRQLRRFLGTAGFCRLWIPGFAEMAAPLYPLTKPGTLFNWGPDQQKAYQEIKQALLTAPALGLPDLTKPFELFVDEKQGYAKGVLTQKLGPWRRPVAYLSKKLDPVAAGWPPCLRMVAAIAVLTKDAGKLTMGQPLVILAPHAVEALVKQPPDRWLSNARMTHYQALLLDTDRVQFGPVVALNPATLLPLPEEGLQHNCLDILAEAHGTRPDLTDQPLPDADHTWYTDGSSLLQEGQRKAGAAVTTETEVIWAKALPAGTSAQRAELIALTQALKMAEGKKLNVYTDSRYAFATAHIHGEIYRRRGWLTSEGKEIKNKDEILALLKALFLPKRLSIIHCPGHQKGHSAEARGNRMADQAARKAAITETPDTSTLLIENSSP

SEQ ID NO: 87 - protein, 677 aa, Artificial Sequence
  Synthetic
TLNIEDEYRLHETSKEPDVSLGSTWLSDFPQAWAETGGMGLAVRQAPLIIPLKATSTPVSIKQYPMSQEARLGIKPHIQRLLDQGILVPCQSPWNTPLLPVKKPGTNDYRPVQDLREVNKRVEDIHPTVPNPYNLLSGLPPSHQWYTVLDLKDAFFCLRLHPTSQPLFAFEWRDPEMGISGQLTWTRLPQGFKNSPTLFNEALHRDLADFRIQHPDLILLQYVDDLLLAATSELDCQQGTRALLQTLGNLGYRASAKKAQICQKQVKYLGYLLKEGQRWLTEARKETVMGQPTPKTPRQLREFLGTAGFCRLWIPGFAEMAAPLYPLTKPGTLFNWGPDQQKAYQEIKQALLTAPALGLPDLTKPFELFVDEKQGYAKGVLTQKLGPWRRPVAYLSKKLDPVAAGWPPCLRMVAAIAVLTKDAGKLTMGQPLVILAPHAVEALVKQPPDRWLSNARMTHYQALLLDTDRVQFGPVVALNPATLLPLPEEGLQHNCLDILAEAHGTRPDLTDQPLPDADHTWYTDGSSLLQEGQRKAGAAVTTETEVIWAKALPAGTSAQRAELIALTQALKMAEGKKLNVYTDSRYAFATAHIHGEIYRRRGWLTSKGKEIKNKDEILALLKALFLPKRLSIIHCPGHQKGHSAEARGNRMADQAARKAAITETPDTSTLLIENSSP

SEQ ID NO: 88 - protein, 677 aa, Artificial Sequence
  Synthetic
TLNIEDEYRLHETSKEPDVSLGSTWLSDFPQAWAETGGMGLAVRQAPLIIPLKATSTPVSIKQYPMSQEARLGIKPHIQRLLDQGILVPCQSPWNTPLLPVKKPGTNDYRPVQDLREVNKRVEDIHPTVPNPYNLLSGPPPSHQWYTVLDLKDAFFCLRLHPTSQPLFAFEWRDPEMGISGQLTWTRLPQGFKNSPTLFNEALHRDLADFRIQHPDLILLQYVDDLLLAATSELDCQQGTRALLQTLGNLGYRASAKKAQICQKQVKYLGYLLKEGQRWLTEARKETVMGQPTPKTPRQLREFLGTAGFCRLWIPGFAEMAAPLYPLTKPGTLFNWGPDQQKAYQEIKQALLTAPALGLPDLTKPFELFVDEKQGYAKGVLTQKLGPWRRPVAYLSKKLDPVAAGWPPCLRMVAAIAVLTKDAGKLTMGQPLVILAPHAVEALVKQPPDRWLSNARMTHYQALLLDTDRVQFGPVVALNPATLLPLPEEGLQHNCLDILAEAHGTRPDLTDQPLPDADHTWYTDGSSLLQEGQRKAGAAVTTETEVIWAKALPAGTSAQRAELIALTQALKMAEGKKLNVYTDSRYAFATAHIHGEIYRRRGWLTSEGKEIKNKDEILALLKALFLPKRLSIIHCPGHQKGHSAEARGNRMADQAARKAAITETPDTSTLLIENSSP

SEQ ID NO: 89 - protein, 677 aa, Artificial Sequence
  Synthetic
TLNIEDEYRLHETSKEPDVSLGSTWLSDFPQAWAETGGMGLAVRQAPLIIPLKATSTPVSIKQYPMSQEARLGIKPHIQRLLDQGILVPCQSPWNTPLLPVKKPGTNDYRPVQDLREVNKRVEDIHPTVPNPYNLLSGLPPSHQWYTVLDLKDAFFCLRLHPTSQPLFAFEWRDPEMGISGQLTWTRLPQGFKNSPTLFNEALHRDLADFRIQHPDLILLQYVDDLLLAATSELDCQQGTRALLQTLGNLGYRASAKKAQICQKQVKYLGYLLKEGQRWLTEARKETVMGQPTPKTPRQLREFLGTAGFCRLWIPGFAEMAAPLYPLTKPGTLFNWGPDQQKAYQEIKQALLTAPALGLPDLTKPFELFVDEKQGYAKGVLTQKLGPWRRPVAYLSKKLDPVAAGWPPCLRMVAAIAVLTKDAGKLTMGQPLVIGAPHAVEALVKQPPDRWLSNARMTHYQALLLDTDRVQFGPVVALNPATLLPLPEEGLQHNCLDILAEAHGTRPDLTDQPLPDADHTWYTDGSSLLQEGQRKAGAAVTTETEVIWAKALPAGTSAQRAELIALTQALKMAEGKKLNVYTDSRYAFATAHIHGEIYRRRGWLTSEGKEIKNKDEILALLKALFLPKRLSIIHCPGHQKGHSAEARGNRMADQAARKAAITETPDTSTLLIENSSP

SEQ ID NO: 90 - protein, 677 aa, Artificial Sequence
  Synthetic
TLNIEDEYRLHETSKEPDVSLGSTWLSDFPQAWAETGGMGLAVRQAPLIIPLKATSTPVSIKQYPMSQEARLGIKPHIQRLLDQGILVPCQSPWNTPLLPVKKPGTNDYRPVQDLREVNKRVEDIHPTVPNPYNLLSGLPPSHQWYTVLDLKDAFFCLRLHPTSQPLFAFEWRDPEMGISGQLTWTRLPQGFKNSPTLFNEALHRDLADFRIQHPDLILLQYVDDLLLAATSELDCQQGTRALLQTLGNLGYRASAKKAQICQKQVKYLGYLLKEGQRWLTEARKETVMGQPTPKTPRQLREFLGTAGFCRLWIPGFAEMAAPLYPLTKPGTLFNWGPDQQKAYQEIKQALLTAPALGLPDLTKPFELFVDEKQGYAKGVLTQKLGPWRRPVAYLSKKLDPVAAGWPPCLRMVAAIAVLTKDAGKLTMGQPLVILAPHAVEALVKQPPDRWLSKARMTHYQALLLDTDRVQFGPVVALNPATLLPLPEEGLQHNCLDILAEAHGTRPDLTDQPLPDADHTWYTDGSSLLQEGQRKAGAAVTTETEVIWAKALPAGTSAQRAELIALTQALKMAEGKKLNVYTDSRYAFATAHIHGEIYRRRGWLTSEGKEIKNKDEILALLKALFLPKRLSIIHCPGHQKGHSAEARGNRMADQAARKAAITETPDTSTLLIENSSP

SEQ ID NO: 91 - protein, 677 aa, Artificial Sequence
  Synthetic
TLNIEDEYRLHETSKEPDVSLGSTWLSDFPQAWAETGGMGLAVRQAPLIIPLKATSTPVSIKQYPMSQEARLGIKPHIQRLLDQGILVPCQSPWNTPLLPVKKPGTNDYRPVQDLREVNKRVEDIHPTVPNPYNLLSGLPPSHQWYTVLDLKDAFFCLRLHPTSQPLFAFEWRDPEMGISGQLTWTRLPQGFKNSPTLFNEALHRDLADFRIQHPDLILLQYVDDLLLAATSELDCQQGTRALLQTLGNLGYRASAKKAQICQKQVKYLGYLLKEGQRWLTEARKETVMGQPTPKTPRQLREFLGKAGFCRLWIPGFAEMAAPLYPLTKPGTLFNWGPDQQKAYQEIKQALLTAPALGLPDLTKPFELFVDEKQGYAKGVLTQKLGPWRRPVAYLSKKLDPVAAGWPPCLRMVAAIAVLTKDAGKLTMGQPLVILAPHAVEALVKQPPDRWLSNARMTHYQALLLDTDRVQFGPVVALNPATLLPLPEEGLQHNCLDILAEAHGTRPDLTDQPLPDADHTWYTDGSSLLQEGQRKAGAAVTTETEVIWAKALPAGTSAQRAELIALTQALKMAEGKKLNVYTDSRYAFATAHIHGEIYRRRGWLTSEGKEIKNKDEILALLKALFLPKRLSIIHCPGHQKGHSAEARGNRMADQAARKAAITETPDTSTLLIENSSP

SEQ ID NO: 92 - protein, 677 aa, Artificial Sequence
  Synthetic
TLNIEDEYRLHETSKEPDVSLGSTWLSDFPQAWAETGGMGLAVRQAPLIIPLKATSTPVSIKQYPMSQEARLGIKPHIQRLLDQGILVPCQSPWNTPLLPVKKPGTNDYRPVQDLREVNKRVEDIHPTVPNPYNLLSGLPPSHQWYTVLDLKDAFFCLRLHPTSQPLFAFEWRDPEMGISGQLTWTRLPQGFKNSPTLFNEALHRDLADFRIQHPDLILLQYVDDLLLAATSELDCQQGTRALLQTLGNLGYRASAKKAQICQKQVKYLGYLLKEGQRWLTEARKETVMGQPTPKTPRQLREFLGTAGFCRLFIPGFAEMAAPLYPLTKPGTLFNWGPDQQKAYQEIKQALLTAPALGLPDLTKPFELFVDEKQGYAKGVLTQKLGPWRRPVAYLSKKLDPVAAGWPPCLRMVAAIAVLTKDAGKLTMGQPLVILAPHAVEALVKQPPDRWLSNARMTHYQALLLDTDRVQFGPVVALNPATLLPLPEEGLQHNCLDILAEAHGTRPDLTDQPLPDADHTWYTDGSSLLQEGQRKAGAAVTTETEVIWAKALPAGTSAQRAELIALTQALKMAEGKKLNVYTDSRYAFATAHIHGEIYRRRGWLTSEGKEIKNKDEILALLKALFLPKRLSIIHCPGHQKGHSAEARGNRMADQAARKAAITETPDTSTLLIENSSP

SEQ ID NO: 93 - protein, 677 aa, Artificial Sequence
  Synthetic
TLNIEDEYRLHETSKEPDVSLGSTWLSDFPQAWAETGGMGLAVRQAPLIIPLKATSTPVSIKQYPMSQEARLGIKPHIQRLLDQGILVPCQSPWNTPLLPVKKPGTNDYRPVQDLREVNKRVEDIHPTVPNPYNLLSGLPPSHQWYTVLDLKDAFFCLRLHPTSQPLFAFEWRDPEMGISGQLTWTRLPQGFKNSPTLFNEALHRDLADFRIQHPDLILLQYVDDLLLAATSELDCQQGTRALLQTLGNLGYRASAKKAQICQKQVKYLGYLLKEGQRWLTEARKETVMGQPTPKTPRQLREFLGTAGFCRLWIPGFAEMAAPLYPLTKPGTLFNWGPDQQKAYQEIKQALLTAPALGLPDLTKPFELFVDEKQGYAKGVLTQKLGPWRRPVAYLSKKLDPVAAGWPPCLRMVAAIAVLTKDAGKLTMGQPLVILAPHAVEALVKQPPDRWLSNARMTHYQALLLDTDRVQFGPVVALNPATLLPLPEEGLQHNCLDILAEAHGTRPDLTDQPLPDADHTWYTGGSSLLQEGQRKAGAAVTTETEVIWAKALPAGTSAQRAQLIALTQALKMAEGKKLNVYTNSRYAFATAHIHGEIYRRRGWLTSEGKEIKNKDEILALLKALFLPKRLSIIHCPGHQKGHSAEARGNRMADQAARKAAITETPDTSTLLIENSSP

SEQ ID NO: 94 - protein, 677 aa, Artificial Sequence
  Synthetic
TLNIEDEYRLHETSKEPDVSLGSTWLSDFPQAWAETGGMGLAVRQAPLIIPLKATSTPVSIKQYPMSQEARLGIKPHIQRLLDQGILVPCQSPWNTPLLPVKKPGTNDYRPVQDLREVNKRVEDIHPTVPNPYNLLSGLPPSHQWYTVLDLKDAFFCLRLHPTSQPLFAFEWRDPEMGISGQLTWTRLPQGFKNSPTLFNEALHRDLADFRIQHPDLILLQYVDDLLLAATSELDCQQGTRALLQTLGNLGYRASAKKAQICQKQVKYLGYLLKEGQRWLTEARKETVMGQPTPKTPRQLRRFLGTAGFCRLFIPGFAEMAAPLYPLTKPGTLFNWGPDQQKAYQEIKQALLTAPALGLPDLTKPFELFVDEKQGYAKGVLTQKLGPWRRPVAYLSKKLDPVAAGWPPCLRMVAAIAVLTKDAGKLTMGQPLVILAPHAVEALVKQPPDRWLSNARMTHYQALLLDTDRVQFGPVVALNPATLLPLPEEGLQHNCLDILAEAHGTRPDLTDQPLPDADHTWYTDGSSLLQEGQRKAGAAVTTETEVIWAKALPAGTSAQRAELIALTQALKMAEGKKLNVYTDSRYAFATAHIHGEIYRRRGWLTSEGKEIKNKDEILALLKALFLPKRLSIIHCPGHQKGHSAEARGNRMADQAARKAAITETPDTSTLLIENSSP

SEQ ID NO: 95 - protein, 677 aa, Artificial Sequence
  Synthetic
TLNIEDEYRLHETSKEPDVSLGSTWLSDFPQAWAETGGMGLAVRQAPLIIPLKATSTPVSIKQYPMSQEARLGIKPHIQRLLDQGILVPCQSPWNTPLLPVKKPGTNDYRPVQDLREVNKRVEDIHPTVPNPYNLLSGPPPSHQWYTVLDLKDAFFCLRLHPTSQPLFAFEWRDPEMGISGQLTWTRLPQGFKNSPTLFNEALHRDLADFRIQHPDLILLQYVDDLLLAATSELDCQQGTRALLQTLGNLGYRASAKKAQICQKQVKYLGYLLKEGQRWLTEARKETVMGQPTPKTPRQLREFLGTAGFCRLWIPGFAEMAAPLYPLTKPGTLFNWGPDQQKAYQEIKQALLTAPALGLPDLTKPFELFVDEKQGYAKGVLTQKLGPWRRPVAYLSKKLDPVAAGWPPCLRMVAAIAVLTKDAGKLTMGQPLVILAPHAVEALVKQPPDRWLSNARMTHYQALLLDTDRVQFGPVVALNPATLLPLPEEGLQHNCLDILAEAHGTRPDLTDQPLPDADHTWYTDGSSLLQEGQRKAGAAVTTETEVIWAKALPAGTSAQRAELIALTQALKMAEGKKLNVYTDSRYAFATAHIHGEIYRRRGWLTSKGKEIKNKDEILALLKALFLPKRLSIIHCPGHQKGHSAEARGNRMADQAARKAAITETPDTSTLLIENSSP

SEQ ID NO: 96 - protein, 677 aa, Artificial Sequence
  Synthetic
TLNIEDEYRLHETSKEPDVSLGSTWLSDFPQAWAETGGMGLAVRQAPLIILLKATSTPVSIKQYPMKQEARLGIKPHIQRLLDQGILVPCQSPWNTPLLPVKKPGTNDYRPVQDLREVNKRVEDIHPTVPNPYNLLSGLPPSHQWYTVLDLKDAFFCLRLHPTSQPLFAFEWRDPEMGISGQLTWTRLPQGFKNSPALFDEALRRDLADFRIQHPDLILLQYVDDLLLAATSELDCQQGTRALLQTLGNLGYRASAKKAQICQKQVKYLGYLLKEGQRWLTEARKETVMGQPTPKTPRQLRKFLGTAGNCRLFIPGFAEMAAPLYPLTKPGTLFNWGPDQQKAYQEIKQALLTAPALGLPDLTKPFELFVDEKQGYAKGVLTQKLGPWRRPVAYLSKKLDPVAAGWPPCLRMVAAIAVLTKDAGKLTMGQPLVIGAPHAVEALVKQPPDRWLSKARMTHYQALLLDTDRVQFGPVVALNPATLLPLPEEGLQHNCLDILAEAHGTRPDLTDQPLPDADHTWYTGGSSLLQEGQRKAGAAVTTETEVIWAKALPAGTSAQRAELIALTQALKMAEGKKLNVYTNSRYAFATAHIQGEIYRRRGLLTSEGKEIKNKDEILALLKALFLPKRLSIIHCPGHQKGHSAEARGNRMANQAARKAAITETPDTSTLLIENSSP

SEQ ID NO: 97 - protein, 677 aa, Artificial Sequence
  Synthetic
TLNIEDEYRLHETSKEPDVSLGSTWLSDFPQAWAETGGMGLAVRQAPLIILLKATSTPVSIKQYPMKQEARLGIKPHIQRLLDQGILVPCQSPWNTPLLPVKKPGTNDYRPVQDLREVNKRVEDIHPTVPNPYNLLSGLPPSHQWYTVLDLKDAFFCLRLHPTSQPLFAFEWRDPEMGISGQLTWTRLPQGFKNSPALFNEALRRDLADFRIQHPDLILLQYVDDLLLAATSELDCQQGTRALLQTLGNLGYRASAKKAQICQKQVKYLGYLLKEGQRWLTEARKETVMGQPTPKTPRQLRKFLGTAGNCRLFIPGFAEMAAPLYPLTKPGTLFNWGPDQQKAYQEIKQALLTAPALGLPDLTKPFELFVDEKQGYAKGVLTQKLGPWRRPVAYLSKKLDPVAAGWPPCLRMVAAIAVLTKDAGKLTMGQPLVIGAPHAVEALVKQPPDRWLSKARMTHYQALLLDTDRVQFGPVVALNPATLLPLPEEGLQHNCLDILAEAHGTRPDLTDQPLPDADHTWYTGGSSLLQEGQRKAGAAVTTETEVIWAKALPAGTSAQRAELIALTQALKMAEGKKLNVYTNSRYAFATAHIQGEIYRRRGLLTSEGKEIKNKDEILALLKALFLPKRLSIIHCPGHQKGHSAEARGNRMANQAARKAAITETPDTSTLLIENSSP

SEQ ID NO: 98 - protein, 677 aa, Artificial Sequence
  Synthetic
TLNIEDEYRLHETSKEPDVSLGSTWLSDFPQAWAETGGMGLAVRQAPLIIPLKATSTPVSIKQYPMSQEARLGIKPHIQRLLDQGILVPCQSPWNTPLLPVKKPGTNDYRPVQDLREVNKRVEDIHPTVPNPYNLLSGLPPSHQWYTVLDLKDAFFCLRLHPTSQPLFAFEWRDPEMGISGQLTWTRLPQGFKNSPTLFNEALHRDLADFRIQHPDLILLQYVDDLLLAATSELDCQQGTRALLQTLGNLGYRASAKKAQICQKQVKYLGYLLKEGQRWLTEARKETVMGQPTPKTPRQLREFLGKAGFCRLFIPGFAEMAAPLYPLTKPGTLFNWGPDQQKAYQEIKQALLTAPALGLPDLTKPFELFVDEKQGYAKGVLTQKLGPWRRPVAYLSKKLDPVAAGWPPCLRMVAAIAVLTKDAGKLTMGQPLVILAPHAVEALVKQPPDRWLSNARMTHYQALLLDTDRVQFGPVVALNPATLLPLPEEGLQHNCLDILAEAHGTRPDLTDQPLPDADHTWYTDGSSLLQEGQRKAGAAVTTETEVIWAKALPAGTSAQRAELIALTQALKMAEGKKLNVYTDSRYAFATAHIHGEIYRRRGWLTSEGKEIKNKDEILALLKALFLPKRLSIIHCPGHQKGHSAEARGNRMADQAARKAAITETPDTSTLLIENSSP

SEQ ID NO: 99 - protein, 2131 aa, Artificial Sequence
  Synthetic
MKRTADGSEFESPKKKRKVDKKYSIGLDIGTNSVGWAVITDEYKVPSKKFKVLGNTDRHSIKKNLIGALLFDSGETAEATRLKRTARRRYTRRKNRICYLQEIFSNEMAKVDDSFFHRLEESFLVEEDKKHERHPIFGNIVDEVAYHEKYPTIYHLRKKLVDSTDKADLRLIYLALAHMIKFRGHFLIEGDLNPDNSDVDKLFIQLVQTYNQLFEENPINASGVDAKAILSARLSKSRKLENLIAQLPGEKKNGLFGNLIALSLGLTPNFKSNFDLAEDAKLQLSKDTYDDDLDNLLAQIGDQYADLFLAAKNLSDAILLSDILRVNTEITKAPLSASMIKRYDEHHQDLTLLKALVRQQLPEKYKEIFFDQSKNGYAGYIDGGASQEEFYKFIKPILEKMDGTEELLVKLKREDLLRKQRTFDNGSIPHQIHLGELHAILRRQEDFYPFLKDNREKIEKILTFRIPYYVGPLARGNSRFAWMTRKSEETITPWNFEEVVDKGASAQSFIERMTNFDKNLPNEKVLPKHSLLYEYFTVYNELTKVKYVTEGMRKPAFLSGEQKKAIVDLLFKTNRKVTVKQLKEDYFKKIECFDSVEISGVEDRFNASLGTYHDLLKIIKDKDFLDNEENEDILEDIVLTLTLFEDREMIEERLKTYAHLFDDKVMKQLKRRRYTGWGRLSRKLINGIRDKQSGKTILDFLKSDGFANRNFMQLIHDDSLTFKEDIQKAQVSGQGDSLHEHIANLAGSPAIKKGILQTVKVVDELVKVMGRHKPENIVIEMARENQTTQKGQKNSRERMKRIEEGIKELGSQILKEHPVENTQLQNEKLYLYYLQNGRDMYVDQELDINRLSDYDVDAIVPQSFLKDDSIDNKVLTRSDKNRGKSDNVPSEEVVKKMKNYWRQLLNAKLITQRKFDNLTKAERGGLSELDKAGFIKRQLVETRQITKHVAQILDSRMNTKYDENDKLIREVKVITLKSKLVSDFRKDFQFYKVREINNYHHAHDAYLNAVVGTALIKKYPKLESEFVYGDYKVYDVRKMIAKSEQEIGKATAKYFFYSNIMNFFKTEITLANGEIRKRPLIETNGETGEIVWDKGRDFATVRKVLSMPQVNIVKKTEVQTGGFSKESILPKRNSDKLIARKKDWDPKKYGGFDSPTVAYSVLVVAKVEKGKSKKLKSVKELLGITIMERSSFEKNPIDFLEAKGYKEVKKDLIIKLPKYSLFELENGRKRMLASAGELQKGNELALPSKYVNFLYLASHYEKLKGSPEDNEQKQLFVEQHKHYLDEIIEQISEFSKRVILADANLDKVLSAYNKHRDKPIREQAENIIHLFTLTNLGAPAAFKYFDTTIDRKRYTSTKEVLDATLIHQSITGLYETRIDLSQLGGDSGGSSGGSKRTADGSEFESPKKKRKVSGGSSGGSTLNIEDEYRLHETSKEPDVSLGSTWLSDFPQAWAETGGMGLAVRQAPLIIPLKATSTPVSIKQYPMSQEARLGIKPHIQRLLDQGILVPCQSPWNTPLLPVKKPGTNDYRPVQDLREVNKRVEDIHPTVPNPYNLLSGLPPSHQWYTVLDLKDAFFCLRLHPTSQPLFAFEWRDPEMGISGQLTWTRLPQGFKNSPTLFNEALHRDLADFRIQHPDLILLQYVDDLLLAATSELDCQQGTRALLQTLGNLGYRASAKKAQICQKQVKYLGYLLKEGQRWLTEARKETVMGQPTPKTPRQLREFLGKAGFCRLFIPGFAEMAAPLYPLTKPGTLFNWGPDQQKAYQEIKQALLTAPALGLPDLTKPFELFVDEKQGYAKGVLTQKLGPWRRPVAYLSKKLDPVAAGWPPCLRMVAAIAVLTKDAGKLTMGQPLVILAPHAVEALVKQPPDRWLSNARMTHYQALLLDTDRVQFGPVVALNPATLLPLPEEGLQHNCLDILAEAHGTRPDLTDQPLPDADHTWYTDGSSLLQEGQRKAGAAVTTETEVIWAKALPAGTSAQRAELIALTQALKMAEGKKLNVYTDSRYAFATAHIHGEIYRRRGWLTSEGKEIKNKDEILALLKALFLPKRLSIIHCPGHQKGHSAEARGNRMADQAARKAAITETPDTSTLLIENSSPSGGSKRTADGSEFESPKKKRKVGSGPAAKRVKLD

SEQ ID NO: 100 - protein, 2117 aa, Artificial Sequence
  Synthetic
MKRTADGSEFESPKKKRKVDKKYSIGLDIGTNSVGWAVITDEYKVPSKKFKVLGNTDRHSIKKNLIGALLFDSGETAEATRLKRTARRRYTRRKNRICYLQEIFSNEMAKVDDSFFHRLEESFLVEEDKKHERHPIFGNIVDEVAYHEKYPTIYHLRKKLVDSTDKADLRLIYLALAHMIKFRGHFLIEGDLNPDNSDVDKLFIQLVQTYNQLFEENPINASGVDAKAILSARLSKSRRLENLIAQLPGEKKNGLFGNLIALSLGLTPNFKSNFDLAEDAKLQLSKDTYDDDLDNLLAQIGDQYADLFLAAKNLSDAILLSDILRVNTEITKAPLSASMIKRYDEHHQDLTLLKALVRQQLPEKYKEIFFDQSKNGYAGYIDGGASQEEFYKFIKPILEKMDGTEELLVKLNREDLLRKQRTFDNGSIPHQIHLGELHAILRRQEDFYPFLKDNREKIEKILTFRIPYYVGPLARGNSRFAWMTRKSEETITPWNFEEVVDKGASAQSFIERMTNFDKNLPNEKVLPKHSLLYEYFTVYNELTKVKYVTEGMRKPAFLSGEQKKAIVDLLFKTNRKVTVKQLKEDYFKKIECFDSVEISGVEDRFNASLGTYHDLLKIIKDKDFLDNEENEDILEDIVLTLTLFEDREMIEERLKTYAHLFDDKVMKQLKRRRYTGWGRLSRKLINGIRDKQSGKTILDFLKSDGFANRNFMQLIHDDSLTFKEDIQKAQVSGQGDSLHEHIANLAGSPAIKKGILQTVKVVDELVKVMGRHKPENIVIEMARENQTTQKGQKNSRERMKRIEEGIKELGSQILKEHPVENTQLQNEKLYLYYLQNGRDMYVDQELDINRLSDYDVDAIVPQSFLKDDSIDNKVLTRSDKNRGKSDNVPSEEVVKKMKNYWRQLLNAKLITQRKFDNLTKAERGGLSELDKAGFIKRQLVETRQITKHVAQILDSRMNTKYDENDKLIREVKVITLKSKLVSDFRKDFQFYKVREINNYHHAHDAYLNAVVGTALIKKYPKLESEFVYGDYKVYDVRKMIAKSEQEIGKATAKYFFYSNIMNFFKTEITLANGEIRKRPLIETNGETGEIVWDKGRDFATVRKVLSMPQVNIVKKTEVQTGGFSKESILPKRNSDKLIARKKDWDPKKYGGFDSPTVAYSVLVVAKVEKGKSKKLKSVKELLGITIMERSSFEKNPIDFLEAKGYKEVKKDLIIKLPKYSLFELENGRKRMLASAGELQKGNELALPSKYVNFLYLASHYEKLKGSPEDNEQKQLFVEQHKHYLDEIIEQISEFSKRVILADANLDKVLSAYNKHRDKPIREQAENIIHLFTLTNLGAPAAFKYFDTTIDRKRYTSTKEVLDATLIHQSITGLYETRIDLSQLGGDSGGSSGGSSGSETPGTSESATPESSGGSSGGSSTLNIEDEYRLHETSKEPDVSLGSTWLSDFPQAWAETGGMGLAVRQAPLIIPLKATSTPVSIKQYPMSQEARLGIKPHIQRLLDQGILVPCQSPWNTPLLPVKKPGTNDYRPVQDLREVNKRVEDIHPTVPNPYNLLSGLPPSHQWYTVLDLKDAFFCLRLHPTSQPLFAFEWRDPEMGISGQLTWTRLPQGFKNSPTLFDEALHRDLADFRIQHPDLILLQYVDDLLLAATSELDCQQGTRALLQTLGNLGYRASAKKAQICQKQVKYLGYLLKEGQRWLTEARKETVMGQPTPKTPRQLREFLGTAGFCRLWIPGFAEMAAPLYPLTKTGTLFNWGPDQQKAYQEIKQALLTAPALGLPDLTKPFELFVDEKQGYAKGVLTQKLGPWRRPVAYLSKKLDPVAAGWPPCLRMVAAIAVLTKDAGKLTMGQPLVILAPHAVEALVKQPPDRWLSNARMTHYQALLLDTDRVQFGPVVALNPATLLPLPEEGLQHNCLDILAEAHGTRPDLTDQPLPDADHTWYTDGSSLLQEGQRKAGAAVTTETEVIWAKALPAGTSAQRAELIALTQALKMAEGKKLNVYTDSRYAFATAHIHGEIYRRRGLLTSEGKEIKNKDEILALLKALFLPKRLSIIHCPGHQKGHSAEARGNRMADQAARKAAITETPDTSTLLIENSSPSGGSKRTADGSEFEPKKKRKV

SEQ ID NO: 101 - protein, 19 aa, Artificial Sequence
  Synthetic
MKRTADGSEFESPKKKRKV

SEQ ID NO: 102 - protein, 33 aa, Artificial Sequence
  Synthetic
SGGSSGGSSGSETPGTSESATPESSGGSSGGSS

SEQ ID NO: 103 - protein, 21 aa, Artificial Sequence
  Synthetic
SGGSKRTADGSEFEPKKKRKV

SEQ ID NO: 104 - protein, 1367 aa, Artificial Sequence
  Synthetic
DKKYSIGLDIGTNSVGWAVITDEYKVPSKKFKVLGNTDRHSIKKNLIGALLFDSGETAEATRLKRTARRRYTRRKNRICYLQEIFSNEMAKVDDSFFHRLEESFLVEEDKKHERHPIFGNIVDEVAYHEKYPTIYHLRKKLVDSTDKADLRLIYLALAHMIKFRGHFLIEGDLNPDNSDVDKLFIQLVQTYNQLFEENPINASGVDAKAILSARLSKSRKLENLIAQLPGEKKNGLFGNLIALSLGLTPNFKSNFDLAEDAKLQLSKDTYDDDLDNLLAQIGDQYADLFLAAKNLSDAILLSDILRVNTEITKAPLSASMIKRYDEHHQDLTLLKALVRQQLPEKYKEIFFDQSKNGYAGYIDGGASQEEFYKFIKPILEKMDGTEELLVKLKREDLLRKQRTFDNGSIPHQIHLGELHAILRRQEDFYPFLKDNREKIEKILTFRIPYYVGPLARGNSRFAWMTRKSEETITPWNFEEVVDKGASAQSFIERMTNFDKNLPNEKVLPKHSLLYEYFTVYNELTKVKYVTEGMRKPAFLSGEQKKAIVDLLFKTNRKVTVKQLKEDYFKKIECFDSVEISGVEDRFNASLGTYHDLLKIIKDKDFLDNEENEDILEDIVLTLTLFEDREMIEERLKTYAHLFDDKVMKQLKRRRYTGWGRLSRKLINGIRDKQSGKTILDFLKSDGFANRNFMQLIHDDSLTFKEDIQKAQVSGQGDSLHEHIANLAGSPAIKKGILQTVKVVDELVKVMGRHKPENIVIEMARENQTTQKGQKNSRERMKRIEEGIKELGSQILKEHPVENTQLQNEKLYLYYLQNGRDMYVDQELDINRLSDYDVDAIVPQSFLKDDSIDNKVLTRSDKNRGKSDNVPSEEVVKKMKNYWRQLLNAKLITQRKFDNLTKAERGGLSELDKAGFIKRQLVETRQITKHVAQILDSRMNTKYDENDKLIREVKVITLKSKLVSDFRKDFQFYKVREINNYHHAHDAYLNAVVGTALIKKYPKLESEFVYGDYKVYDVRKMIAKSEQEIGKATAKYFFYSNIMNFFKTEITLANGEIRKRPLIETNGETGEIVWDKGRDFATVRKVLSMPQVNIVKKTEVQTGGFSKESILPKRNSDKLIARKKDWDPKKYGGFDSPTVAYSVLVVAKVEKGKSKKLKSVKELLGITIMERSSFEKNPIDFLEAKGYKEVKKDLIIKLPKYSLFELENGRKRMLASAGELQKGNELALPSKYVNFLYLASHYEKLKGSPEDNEQKQLFVEQHKHYLDEIIEQISEFSKRVILADANLDKVLSAYNKHRDKPIREQAENIIHLFTLTNLGAPAAFKYFDTTIDRKRYTSTKEVLDATLIHQSITGLYETRIDLSQLGGD

SEQ ID NO: 105 - protein, 34 aa, Artificial Sequence
  Synthetic
SGGSSGGSKRTADGSEFESPKKKRKVSGGSSGGS

SEQ ID NO: 106 - protein, 3 aa, Artificial Sequence
  Synthetic
GSG

SEQ ID NO: 107 - protein, 2117 aa, Artificial Sequence
  Synthetic
MKRTADGSEFESPKKKRKVDKKYSIGLDIGTNSVGWAVITDEYKVPSKKFKVLGNTDRHSIKKNLIGALLFDSGETAEATRLKRTARRRYTRRKNRICYLQEIFSNEMAKVDDSFFHRLEESFLVEEDKKHERHPIFGNIVDEVAYHEKYPTIYHLRKKLVDSTDKADLRLIYLALAHMIKFRGHFLIEGDLNPDNSDVDKLFIQLVQTYNQLFEENPINASGVDAKAILSARLSKSRRLENLIAQLPGEKKNGLFGNLIALSLGLTPNFKSNFDLAEDAKLQLSKDTYDDDLDNLLAQIGDQYADLFLAAKNLSDAILLSDILRVNTEITKAPLSASMIKRYDEHHQDLTLLKALVRQQLPEKYKEIFFDQSKNGYAGYIDGGASQEEFYKFIKPILEKMDGTEELLVKLNREDLLRKQRTFDNGSIPHQIHLGELHAILRRQEDFYPFLKDNREKIEKILTFRIPYYVGPLARGNSRFAWMTRKSEETITPWNFEEVVDKGASAQSFIERMTNFDKNLPNEKVLPKHSLLYEYFTVYNELTKVKYVTEGMRKPAFLSGEQKKAIVDLLFKTNRKVTVKQLKEDYFKKIECFDSVEISGVEDRFNASLGTYHDLLKIIKDKDFLDNEENEDILEDIVLTLTLFEDREMIEERLKTYAHLFDDKVMKQLKRRRYTGWGRLSRKLINGIRDKQSGKTILDFLKSDGFANRNFMQLIHDDSLTFKEDIQKAQVSGQGDSLHEHIANLAGSPAIKKGILQTVKVVDELVKVMGRHKPENIVIEMARENQTTQKGQKNSRERMKRIEEGIKELGSQILKEHPVENTQLQNEKLYLYYLQNGRDMYVDQELDINRLSDYDVDAIVPQSFLKDDSIDNKVLTRSDKNRGKSDNVPSEEVVKKMKNYWRQLLNAKLITQRKFDNLTKAERGGLSELDKAGFIKRQLVETRQITKHVAQILDSRMNTKYDENDKLIREVKVITLKSKLVSDFRKDFQFYKVREINNYHHAHDAYLNAVVGTALIKKYPKLESEFVYGDYKVYDVRKMIAKSEQEIGKATAKYFFYSNIMNFFKTEITLANGEIRKRPLIETNGETGEIVWDKGRDFATVRKVLSMPQVNIVKKTEVQTGGFSKESILPKRNSDKLIARKKDWDPKKYGGFDSPTVAYSVLVVAKVEKGKSKKLKSVKELLGITIMERSSFEKNPIDFLEAKGYKEVKKDLIIKLPKYSLFELENGRKRMLASAGELQKGNELALPSKYVNFLYLASHYEKLKGSPEDNEQKQLFVEQHKHYLDEIIEQISEFSKRVILADANLDKVLSAYNKHRDKPIREQAENIIHLFTLTNLGAPAAFKYFDTTIDRKRYTSTKEVLDATLIHQSITGLYETRIDLSQLGGDSGGSSGGSSGSETPGTSESATPESSGGSSGGSSTLNIEDEYRLHETSKEPDVSLGSTWLSDFPQAWAETGGMGLAVRQAPLIIPLKATSTPVSIKQYPMSQEARLGIKPHIQRLLDQGILVPCQSPWNTPLLPVKKPGTNDYRPVQDLREVNKRVEDIHPTVPNPYNLLSGLPPSHQWYTVLDLKDAFFCLRLHPTSQPLFAFEWRDPEMGISGQLTWTRLPQGFKNSPTLFNEALHRDLADFRIQHPDLILLQYVDDLLLAATSELDCQQGTRALLQTLGNLGYRASAKKAQICQKQVKYLGYLLKEGQRWLTEARKETVMGQPTPKTPRQLREFLGKAGFCRLFIPGFAEMAAPLYPLTKPGTLFNWGPDQQKAYQEIKQALLTAPALGLPDLTKPFELFVDEKQGYAKGVLTQKLGPWRRPVAYLSKKLDPVAAGWPPCLRMVAAIAVLTKDAGKLTMGQPLVILAPHAVEALVKQPPDRWLSNARMTHYQALLLDTDRVQFGPVVALNPATLLPLPEEGLQHNCLDILAEAHGTRPDLTDQPLPDADHTWYTDGSSLLQEGQRKAGAAVTTETEVIWAKALPAGTSAQRAELIALTQALKMAEGKKLNVYTDSRYAFATAHIHGEIYRRRGWLTSEGKEIKNKDEILALLKALFLPKRLSIIHCPGHQKGHSAEARGNRMADQAARKAAITETPDTSTLLIENSSPSGGSKRTADGSEFEPKKKRKV

SEQ ID NO: 108 - protein, 2117 aa, Artificial Sequence
  Synthetic
MKRTADGSEFESPKKKRKVTLNIEDEYRLHETSKEPDVSLGSTWLSDFPQAWAETGGMGLAVRQAPLIIPLKATSTPVSIKQYPMSQEARLGIKPHIQRLLDQGILVPCQSPWNTPLLPVKKPGTNDYRPVQDLREVNKRVEDIHPTVPNPYNLLSGLPPSHQWYTVLDLKDAFFCLRLHPTSQPLFAFEWRDPEMGISGQLTWTRLPQGFKNSPTLFDEALHRDLADFRIQHPDLILLQYVDDLLLAATSELDCQQGTRALLQTLGNLGYRASAKKAQICQKQVKYLGYLLKEGQRWLTEARKETVMGQPTPKTPRQLREFLGTAGFCRLWIPGFAEMAAPLYPLTKTGTLFNWGPDQQKAYQEIKQALLTAPALGLPDLTKPFELFVDEKQGYAKGVLTQKLGPWRRPVAYLSKKLDPVAAGWPPCLRMVAAIAVLTKDAGKLTMGQPLVILAPHAVEALVKQPPDRWLSNARMTHYQALLLDTDRVQFGPVVALNPATLLPLPEEGLQHNCLDILAEAHGTRPDLTDQPLPDADHTWYTDGSSLLQEGQRKAGAAVTTETEVIWAKALPAGTSAQRAELIALTQALKMAEGKKLNVYTDSRYAFATAHIHGEIYRRRGLLTSEGKEIKNKDEILALLKALFLPKRLSIIHCPGHQKGHSAEARGNRMADQAARKAAITETPDTSTLLIENSSPSGGSSGGSSGSETPGTSESATPESSGGSSGGSSDKKYSIGLDIGTNSVGWAVITDEYKVPSKKFKVLGNTDRHSIKKNLIGALLFDSGETAEATRLKRTARRRYTRRKNRICYLQEIFSNEMAKVDDSFFHRLEESFLVEEDKKHERHPIFGNIVDEVAYHEKYPTIYHLRKKLVDSTDKADLRLIYLALAHMIKFRGHFLIEGDLNPDNSDVDKLFIQLVQTYNQLFEENPINASGVDAKAILSARLSKSRRLENLIAQLPGEKKNGLFGNLIALSLGLTPNFKSNFDLAEDAKLQLSKDTYDDDLDNLLAQIGDQYADLFLAAKNLSDAILLSDILRVNTEITKAPLSASMIKRYDEHHQDLTLLKALVRQQLPEKYKEIFFDQSKNGYAGYIDGGASQEEFYKFIKPILEKMDGTEELLVKLNREDLLRKQRTFDNGSIPHQIHLGELHAILRRQEDFYPFLKDNREKIEKILTFRIPYYVGPLARGNSRFAWMTRKSEETITPWNFEEVVDKGASAQSFIERMTNFDKNLPNEKVLPKHSLLYEYFTVYNELTKVKYVTEGMRKPAFLSGEQKKAIVDLLFKTNRKVTVKQLKEDYFKKIECFDSVEISGVEDRFNASLGTYHDLLKIIKDKDFLDNEENEDILEDIVLTLTLFEDREMIEERLKTYAHLFDDKVMKQLKRRRYTGWGRLSRKLINGIRDKQSGKTILDFLKSDGFANRNFMQLIHDDSLTFKEDIQKAQVSGQGDSLHEHIANLAGSPAIKKGILQTVKVVDELVKVMGRHKPENIVIEMARENQTTQKGQKNSRERMKRIEEGIKELGSQILKEHPVENTQLQNEKLYLYYLQNGRDMYVDQELDINRLSDYDVDAIVPQSFLKDDSIDNKVLTRSDKNRGKSDNVPSEEVVKKMKNYWRQLLNAKLITQRKFDNLTKAERGGLSELDKAGFIKRQLVETRQITKHVAQILDSRMNTKYDENDKLIREVKVITLKSKLVSDFRKDFQFYKVREINNYHHAHDAYLNAVVGTALIKKYPKLESEFVYGDYKVYDVRKMIAKSEQEIGKATAKYFFYSNIMNFFKTEITLANGEIRKRPLIETNGETGEIVWDKGRDFATVRKVLSMPQVNIVKKTEVQTGGFSKESILPKRNSDKLIARKKDWDPKKYGGFDSPTVAYSVLVVAKVEKGKSKKLKSVKELLGITIMERSSFEKNPIDFLEAKGYKEVKKDLIIKLPKYSLFELENGRKRMLASAGELQKGNELALPSKYVNFLYLASHYEKLKGSPEDNEQKQLFVEQHKHYLDEIIEQISEFSKRVILADANLDKVLSAYNKHRDKPIREQAENIIHLFTLTNLGAPAAFKYFDTTIDRKRYTSTKEVLDATLIHQSITGLYETRIDLSQLGGDSGGSKRTADGSEFEPKKKRKV

SEQ ID NO: 109 - protein, 2144 aa, Artificial Sequence
  Synthetic
MKRTADGSEFESPKKKRKVTLNIEDEYRLHETSKEPDVSLGSTWLSDFPQAWAETGGMGLAVRQAPLIIPLKATSTPVSIKQYPMSQEARLGIKPHIQRLLDQGILVPCQSPWNTPLLPVKKPGTNDYRPVQDLREVNKRVEDIHPTVPNPYNLLSGLPPSHQWYTVLDLKDAFFCLRLHPTSQPLFAFEWRDPEMGISGQLTWTRLPQGFKNSPTLFDEALHRDLADFRIQHPDLILLQYVDDLLLAATSELDCQQGTRALLQTLGNLGYRASAKKAQICQKQVKYLGYLLKEGQRWLTEARKETVMGQPTPKTPRQLREFLGTAGFCRLWIPGFAEMAAPLYPLTKTGTLFNWGPDQQKAYQEIKQALLTAPALGLPDLTKPFELFVDEKQGYAKGVLTQKLGPWRRPVAYLSKKLDPVAAGWPPCLRMVAAIAVLTKDAGKLTMGQPLVILAPHAVEALVKQPPDRWLSNARMTHYQALLLDTDRVQFGPVVALNPATLLPLPEEGLQHNCLDILAEAHGTRPDLTDQPLPDADHTWYTDGSSLLQEGQRKAGAAVTTETEVIWAKALPAGTSAQRAELIALTQALKMAEGKKLNVYTDSRYAFATAHIHGEIYRRRGLLTSEGKEIKNKDEILALLKALFLPKRLSIIHCPGHQKGHSAEARGNRMADQAARKAAITETPDTSTLLIENSSPSGGSSGGSSGSETPGTSESATPESAGSYPYDVPDYAGSAAPAAKKKKLDGSGSGGSSGGSDKKYSIGLDIGTNSVGWAVITDEYKVPSKKFKVLGNTDRHSIKKNLIGALLFDSGETAEATRLKRTARRRYTRRKNRICYLQEIFSNEMAKVDDSFFHRLEESFLVEEDKKHERHPIFGNIVDEVAYHEKYPTIYHLRKKLVDSTDKADLRLIYLALAHMIKFRGHFLIEGDLNPDNSDVDKLFIQLVQTYNQLFEENPINASGVDAKAILSARLSKSRRLENLIAQLPGEKKNGLFGNLIALSLGLTPNFKSNFDLAEDAKLQLSKDTYDDDLDNLLAQIGDQYADLFLAAKNLSDAILLSDILRVNTEITKAPLSASMIKRYDEHHQDLTLLKALVRQQLPEKYKEIFFDQSKNGYAGYIDGGASQEEFYKFIKPILEKMDGTEELLVKLNREDLLRKQRTFDNGSIPHQIHLGELHAILRRQEDFYPFLKDNREKIEKILTFRIPYYVGPLARGNSRFAWMTRKSEETITPWNFEEVVDKGASAQSFIERMTNFDKNLPNEKVLPKHSLLYEYFTVYNELTKVKYVTEGMRKPAFLSGEQKKAIVDLLFKTNRKVTVKQLKEDYFKKIECFDSVEISGVEDRFNASLGTYHDLLKIIKDKDFLDNEENEDILEDIVLTLTLFEDREMIEERLKTYAHLFDDKVMKQLKRRRYTGWGRLSRKLINGIRDKQSGKTILDFLKSDGFANRNFMQLIHDDSLTFKEDIQKAQVSGQGDSLHEHIANLAGSPAIKKGILQTVKVVDELVKVMGRHKPENIVIEMARENQTTQKGQKNSRERMKRIEEGIKELGSQILKEHPVENTQLQNEKLYLYYLQNGRDMYVDQELDINRLSDYDVDAIVPQSFLKDDSIDNKVLTRSDKNRGKSDNVPSEEVVKKMKNYWRQLLNAKLITQRKFDNLTKAERGGLSELDKAGFIKRQLVETRQITKHVAQILDSRMNTKYDENDKLIREVKVITLKSKLVSDFRKDFQFYKVREINNYHHAHDAYLNAVVGTALIKKYPKLESEFVYGDYKVYDVRKMIAKSEQEIGKATAKYFFYSNIMNFFKTEITLANGEIRKRPLIETNGETGEIVWDKGRDFATVRKVLSMPQVNIVKKTEVQTGGFSKESILPKRNSDKLIARKKDWDPKKYGGFDSPTVAYSVLVVAKVEKGKSKKLKSVKELLGITIMERSSFEKNPIDFLEAKGYKEVKKDLIIKLPKYSLFELENGRKRMLASAGELQKGNELALPSKYVNFLYLASHYEKLKGSPEDNEQKQLFVEQHKHYLDEIIEQISEFSKRVILADANLDKVLSAYNKHRDKPIREQAENIIHLFTLTNLGAPAAFKYFDTTIDRKRYTSTKEVLDATLIHQSITGLYETRIDLSQLGGDSGGSKRTADGSEFEPKKKRKV

SEQ ID NO: 110 - protein, 2529 aa, Artificial Sequence
  Synthetic
MKRTADGSEFESPKKKRKVDKKYSIGLDIGTNSVGWAVITDEYKVPSKKFKVLGNTDRHSIKKNLIGALLFDSGETAEATRLKRTARRRYTRRKNRICYLQEIFSNEMAKVDDSFFHRLEESFLVEEDKKHERHPIFGNIVDEVAYHEKYPTIYHLRKKLVDSTDKADLRLIYLALAHMIKFRGHFLIEGDLNPDNSDVDKLFIQLVQTYNQLFEENPINASGVDAKAILSARLSKSRRLENLIAQLPGEKKNGLFGNLIALSLGLTPNFKSNFDLAEDAKLQLSKDTYDDDLDNLLAQIGDQYADLFLAAKNLSDAILLSDILRVNTEITKAPLSASMIKRYDEHHQDLTLLKALVRQQLPEKYKEIFFDQSKNGYAGYIDGGASQEEFYKFIKPILEKMDGTEELLVKLNREDLLRKQRTFDNGSIPHQIHLGELHAILRRQEDFYPFLKDNREKIEKILTFRIPYYVGPLARGNSRFAWMTRKSEETITPWNFEEVVDKGASAQSFIERMTNFDKNLPNEKVLPKHSLLYEYFTVYNELTKVKYVTEGMRKPAFLSGEQKKAIVDLLFKTNRKVTVKQLKEDYFKKIECFDSVEISGVEDRFNASLGTYHDLLKIIKDKDFLDNEENEDILEDIVLTLTLFEDREMIEERLKTYAHLFDDKVMKQLKRRRYTGWGRLSRKLINGIRDKQSGKTILDFLKSDGFANRNFMQLIHDDSLTFKEDIQKAQVSGQGDSLHEHIANLAGSPAIKKGILQTVKVVDELVKVMGRHKPENIVIEMARENQTTQKGQKNSRERMKRIEEGIKELGSQILKEHPVENTQLQNEKLYLYYLQNGRDMYVDQELDINRLSDYDVDAIVPQSFLKDDSIDNKVLTRSDKNRGKSDNVPSEEVVKKMKNYWRQLLNAKLITQRKFDNLTKAERGGLSELDKAGFIKRQLVETRQITKHVAQILDSRMNTKYDENDKLIREVKVITLKSKLVSDFRKDFQFYKVREINNYHHAHDAYLNAVVGTALIKKYPKLESEFVYGDYKVYDVRKMIAKSEQEIGKATAKYFFYSNIMNFFKTEITLANGEIRKRPLIETNGETGEIVWDKGRDFATVRKVLSMPQVNIVKKTEVQTGGFSKESILPKRNSDKLIARKKDWDPKKYGGFDSPTVAYSVLVVAKVEKGKSKKLKSVKELLGITIMERSSFEKNPIDFLEAKGYKEVKKDLIIKLPKYSLFELENGRKRMLASAGELQKGNELALPSKYVNFLYLASHYEKLKGSPEDNEQKQLFVEQHKHYLDEIIEQISEFSKRVILADANLDKVLSAYNKHRDKPIREQAENIIHLFTLTNLGAPAAFKYFDTTIDRKRYTSTKEVLDATLIHQSITGLYETRIDLSQLGGDSGGSSGGSSGSETPGTSESATPESSGGSSGGSSGIQGLAKLIADVAPSAIRENDIKSYFGRKVAIDASMSIYQFLIAVRQGGDVLQNEEGETTSHLMGMFYRTIRMMENGIKPVYVFDGKPPQLKSGELAKRSERRAEAEKQLQQAQAAGAEQEVEKFTKRLVKVTKQHNDECKHLLSLMGIPYLDAPSEAEASCAALVKAGKVYAAATEDMDCLTFGSPVLMRHLTASEAKKLPIQEFHLSRILQELGLNQEQFVDLCILLGSDYCESIRGIGPKRAVDLIQKHKSIEEIVRRLDPNKYPVPENWLHKEAHQLFLEPEVLDPESVELKWSEPNEEELIKFMCGEKQFSEERIRSGVKRLSKSRQGSTQGRLDDFFKVTGSLSSAKRKEPEPKGSTKKKAKTGAAGKFKRGKSGGSSGGSSGSETPGTSESATPESSGGSSGGSSTLNIEDEYRLHETSKEPDVSLGSTWLSDFPQAWAETGGMGLAVRQAPLIIPLKATSTPVSIKQYPMSQEARLGIKPHIQRLLDQGILVPCQSPWNTPLLPVKKPGTNDYRPVQDLREVNKRVEDIHPTVPNPYNLLSGLPPSHQWYTVLDLKDAFFCLRLHPTSQPLFAFEWRDPEMGISGQLTWTRLPQGFKNSPTLFNEALHRDLADFRIQHPDLILLQYVDDLLLAATSELDCQQGTRALLQTLGNLGYRASAKKAQICQKQVKYLGYLLKEGQRWLTEARKETVMGQPTPKTPRQLREFLGKAGFCRLFIPGFAEMAAPLYPLTKPGTLFNWGPDQQKAYQEIKQALLTAPALGLPDLTKPFELFVDEKQGYAKGVLTQKLGPWRRPVAYLSKKLDPVAAGWPPCLRMVAAIAVLTKDAGKLTMGQPLVILAPHAVEALVKQPPDRWLSNARMTHYQALLLDTDRVQFGPVVALNPATLLPLPEEGLQHNCLDILAEAHGTRPDLTDQPLPDADHTWYTDGSSLLQEGQRKAGAAVTTETEVIWAKALPAGTSAQRAELIALTQALKMAEGKKLNVYTDSRYAFATAHIHGEIYRRRGWLTSEGKEIKNKDEILALLKALFLPKRLSIIHCPGHQKGHSAEARGNRMADQAARKAAITETPDTSTLLIENSSPSGGSKRTADGSEFEPKKKRKV

SEQ ID NO: 111 - protein, 40 aa, Artificial Sequence
  Synthetic
SGGSSGGSSGGSSGSETPGTSESATPESSGGSSGGSSGGS

SEQ ID NO: 112 - protein, 42 aa, Artificial Sequence
  Synthetic
SGGSSGGSSGGSKRTADGSEFESPKKKRKVSGGSSGGSSGGS

SEQ ID NO: 113 - protein, 379 aa, Artificial Sequence
  Synthetic
GIQGLAKLIADVAPSAIRENDIKSYFGRKVAIDASMSIYQFLIAVRQGGDVLQNEEGETTSHLMGMFYRTIRMMENGIKPVYVFDGKPPQLKSGELAKRSERRAEAEKQLQQAQAAGAEQEVEKFTKRLVKVTKQHNDECKHLLSLMGIPYLDAPSEAEASCAALVKAGKVYAAATEDMDCLTFGSPVLMRHLTASEAKKLPIQEFHLSRILQELGLNQEQFVDLCILLGSDYCESIRGIGPKRAVDLIQKHKSIEEIVRRLDPNKYPVPENWLHKEAHQLFLEPEVLDPESVELKWSEPNEEELIKFMCGEKQFSEERIRSGVKRLSKSRQGSTQGRLDDFFKVTGSLSSAKRKEPEPKGSTKKKAKTGAAGKFKRGK

SEQ ID NO: 114 - protein, 1803 aa, Artificial Sequence
  Synthetic
MKRTADGSEFESPKKKRKVGKRNYILGLDIGITSVGYGIIDYETRDVIDAGVRLFKEANVENNEGRRSKRGARRLKRRRRHRIQRVKKLLFDYNLLTDHSELSGINPYEARVKGLSQKLSEEEFSAALLHLAKRRGVHNVNEVEEDTGNELSTKEQISRNSKALEEKYVAELQLERLKKDGEVRGSINRFKTSDYVKEAKQLLKVQKAYHQLDQSFIDTYIDLLETRRTYYEGPGEGSPFGWKDIKEWYEMLMGHCTYFPEELRSVKYAYNADLYNALNDLNNLVITRDENEKLEYYEKFQIIENVFKQKKKPTLKQIAKEILVNEEDIKGYRVTSTGKPEFTNLKVYHDIKDITARKEIIENAELLDQIAKILTIYQSSEDIQEELTNLNSELTQEEIEQISNLKGYTGTHNLSLKAINLILDELWHTNDNQIAIFNRLKLVPKKVDLSQQKEIPTTLVDDFILSPVVKRSFIQSIKVINAIIKKYGLPNDIIIELAREKNSKDAQKMINEMQKRNRQTNERIEEIIRTTGKENAKYLIEKIKLHDMQEGKCLYSLEAIPLEDLLNNPFNYEVDHIIPRSVSFDNSFNNKVLVKQEEASKKGNRTPFQYLSSSDSKISYETFKKHILNLAKGKGRISKTKKEYLLEERDINRFSVQKDFINRNLVDTRYATRGLMNLLRSYFRVNNLDVKVKSINGGFTSFLRRKWKFKKERNKGYKHHAEDALIIANADFIFKEWKKLDKAKKVMENQMFEEKQAESMPEIETEQEYKEIFITPHQIKHIKDFKDYKYSHRVDKKPNRELINDTLYSTRKDDKGNTLIVNNLNGLYDKDNDKLKKLINKSPEKLLMYHHDPQTYQKLKLIMEQYGDEKNPLYKYYEETGNYLTKYSKKDNGPVIKKIKYYGNKLNAHLDITDDYPNSRNKVVKLSLKPYRFDVYLDNGVYKFVTVKNLDVIKKENYYEVNSKCYEEAKKLKKISNQAEFIASFYNNDLIKINGELYRVIGVNNDLLNRIEVNMIDITYREYLENMNDKRPPRIIKTIASKTQSIKKYSTDILGNLYEVKSKKHPQIIKKGSGGSSGGSSGSETPGTSESATPESSGGSSGGSSTLNIEDEYRLHETSKEPDVSLGSTWLSDFPQAWAETGGMGLAVRQAPLIIPLKATSTPVSIKQYPMSQEARLGIKPHIQRLLDQGILVPCQSPWNTPLLPVKKPGTNDYRPVQDLREVNKRVEDIHPTVPNPYNLLSGLPPSHQWYTVLDLKDAFFCLRLHPTSQPLFAFEWRDPEMGISGQLTWTRLPQGFKNSPTLFDEALHRDLADFRIQHPDLILLQYVDDLLLAATSELDCQQGTRALLQTLGNLGYRASAKKAQICQKQVKYLGYLLKEGQRWLTEARKETVMGQPTPKTPRQLREFLGTAGFCRLWIPGFAEMAAPLYPLTKTGTLFNWGPDQQKAYQEIKQALLTAPALGLPDLTKPFELFVDEKQGYAKGVLTQKLGPWRRPVAYLSKKLDPVAAGWPPCLRMVAAIAVLTKDAGKLTMGQPLVILAPHAVEALVKQPPDRWLSNARMTHYQALLLDTDRVQFGPVVALNPATLLPLPEEGLQHNCLDILAEAHGTRPDLTDQPLPDADHTWYTDGSSLLQEGQRKAGAAVTTETEVIWAKALPAGTSAQRAELIALTQALKMAEGKKLNVYTDSRYAFATAHIHGEIYRRRGLLTSEGKEIKNKDEILALLKALFLPKRLSIIHCPGHQKGHSAEARGNRMADQAARKAAITETPDTSTLLIENSSPSGGSKRTADGSEFEPKKKRKV

SEQ ID NO: 115 - protein, 2117 aa, Artificial Sequence
  Synthetic
MKRTADGSEFESPKKKRKVDKKYSIGLDIGTNSVGWAVITDEYKVPSKKFKVLGNTDRHSIKKNLIGALLFDSGETAEATRLKRTARRRYTRRKNRICYLQEIFSNEMAKVDDSFFHRLEESFLVEEDKKHERHPIFGNIVDEVAYHEKYPTIYHLRKKLVDSTDKADLRLIYLALAHMIKFRGHFLIEGDLNPDNSDVDKLFIQLVQTYNQLFEENPINASGVDAKAILSARLSKSRRLENLIAQLPGEKKNGLFGNLIALSLGLTPNFKSNFDLAEDAKLQLSKDTYDDDLDNLLAQIGDQYADLFLAAKNLSDAILLSDILRVNTEITKAPLSASMIKRYDEHHQDLTLLKALVRQQLPEKYKEIFFDQSKNGYAGYIDGGASQEEFYKFIKPILEKMDGTEELLVKLNREDLLRKQRTFDNGSIPHQIHLGELHAILRRQEDFYPFLKDNREKIEKILTFRIPYYVGPLARGNSRFAWMTRKSEETITPWNFEEVVDKGASAQSFIERMTNFDKNLPNEKVLPKHSLLYEYFTVYNELTKVKYVTEGMRKPAFLSGEQKKAIVDLLFKTNRKVTVKQLKEDYFKKIECFDSVEISGVEDRFNASLGTYHDLLKIIKDKDFLDNEENEDILEDIVLTLTLFEDREMIEERLKTYAHLFDDKVMKQLKRRRYTGWGRLSRKLINGIRDKQSGKTILDFLKSDGFANRNFMQLIHDDSLTFKEDIQKAQVSGQGDSLHEHIANLAGSPAIKKGILQTVKVVDELVKVMGRHKPENIVIEMARENQTTQKGQKNSRERMKRIEEGIKELGSQILKEHPVENTQLQNEKLYLYYLQNGRDMYVDQELDINRLSDYDVDAIVPQSFLKDDSIDNKVLTRSDKNRGKSDNVPSEEVVKKMKNYWRQLLNAKLITQRKFDNLTKAERGGLSELDKAGFIKRQLVETRQITKHVAQILDSRMNTKYDENDKLIREVKVITLKSKLVSDFRKDFQFYKVREINNYHHAHDAYLNAVVGTALIKKYPKLESEFVYGDYKVYDVRKMIAKSEQEIGKATAKYFFYSNIMNFFKTEITLANGEIRKRPLIETNGETGEIVWDKGRDFATVRKVLSMPQVNIVKKTEVQTGGFSKESILPKRNSDKLIARKKDWDPKKYGGFVSPTVAYSVLVVAKVEKGKSKKLKSVKELLGITIMERSSFEKNPIDFLEAKGYKEVKKDLIIKLPKYSLFELENGRKRMLASARELQKGNELALPSKYVNFLYLASHYEKLKGSPEDNEQKQLFVEQHKHYLDEIIEQISEFSKRVILADANLDKVLSAYNKHRDKPIREQAENIIHLFTLTNLGAPAAFKYFDTTIDRKQYRSTKEVLDATLIHQSITGLYETRIDLSQLGGDSGGSSGGSSGSETPGTSESATPESSGGSSGGSSTLNIEDEYRLHETSKEPDVSLGSTWLSDFPQAWAETGGMGLAVRQAPLIIPLKATSTPVSIKQYPMSQEARLGIKPHIQRLLDQGILVPCQSPWNTPLLPVKKPGTNDYRPVQDLREVNKRVEDIHPTVPNPYNLLSGLPPSHQWYTVLDLKDAFFCLRLHPTSQPLFAFEWRDPEMGISGQLTWTRLPQGFKNSPTLFNEALHRDLADFRIQHPDLILLQYVDDLLLAATSELDCQQGTRALLQTLGNLGYRASAKKAQICQKQVKYLGYLLKEGQRWLTEARKETVMGQPTPKTPRQLREFLGKAGFCRLFIPGFAEMAAPLYPLTKPGTLFNWGPDQQKAYQEIKQALLTAPALGLPDLTKPFELFVDEKQGYAKGVLTQKLGPWRRPVAYLSKKLDPVAAGWPPCLRMVAAIAVLTKDAGKLTMGQPLVILAPHAVEALVKQPPDRWLSNARMTHYQALLLDTDRVQFGPVVALNPATLLPLPEEGLQHNCLDILAEAHGTRPDLTDQPLPDADHTWYTDGSSLLQEGQRKAGAAVTTETEVIWAKALPAGTSAQRAELIALTQALKMAEGKKLNVYTDSRYAFATAHIHGEIYRRRGWLTSEGKEIKNKDEILALLKALFLPKRLSIIHCPGHQKGHSAEARGNRMADQAARKAAITETPDTSTLLIENSSPSGGSKRTADGSEFEPKKKRKV

SEQ ID NO: 116 - protein, 2117 aa, Unknown
  moloney murine leukemia virus
MKRTADGSEFESPKKKRKVDKKYSIGLDIGTNSVGWAVITDEYKVPSKKFKVLGNTDRHSIKKNLIGALLFDSGETAEATRLKRTARRRYTRRKNRICYLQEIFSNEMAKVDDSFFHRLEESFLVEEDKKHERHPIFGNIVDEVAYHEKYPTIYHLRKKLVDSTDKADLRLIYLALAHMIKFRGHFLIEGDLNPDNSDVDKLFIQLVQTYNQLFEENPINASGVDAKAILSARLSKSRRLENLIAQLPGEKKNGLFGNLIALSLGLTPNFKSNFDLAEDAKLQLSKDTYDDDLDNLLAQIGDQYADLFLAAKNLSDAILLSDILRVNTEITKAPLSASMIKRYDEHHQDLTLLKALVRQQLPEKYKEIFFDQSKNGYAGYIDGGASQEEFYKFIKPILEKMDGTEELLVKLNREDLLRKQRTFDNGSIPHQIHLGELHAILRRQEDFYPFLKDNREKIEKILTFRIPYYVGPLARGNSRFAWMTRKSEETITPWNFEEVVDKGASAQSFIERMTNFDKNLPNEKVLPKHSLLYEYFTVYNELTKVKYVTEGMRKPAFLSGEQKKAIVDLLFKTNRKVTVKQLKEDYFKKIECFDSVEISGVEDRFNASLGTYHDLLKIIKDKDFLDNEENEDILEDIVLTLTLFEDREMIEERLKTYAHLFDDKVMKQLKRRRYTGWGRLSRKLINGIRDKQSGKTILDFLKSDGFANRNFMQLIHDDSLTFKEDIQKAQVSGQGDSLHEHIANLAGSPAIKKGILQTVKVVDELVKVMGRHKPENIVIEMARENQTTQKGQKNSRERMKRIEEGIKELGSQILKEHPVENTQLQNEKLYLYYLQNGRDMYVDQELDINRLSDYDVDAIVPQSFLKDDSIDNKVLTRSDKNRGKSDNVPSEEVVKKMKNYWRQLLNAKLITQRKFDNLTKAERGGLSELDKAGFIKRQLVETRQITKHVAQILDSRMNTKYDENDKLIREVKVITLKSKLVSDFRKDFQFYKVREINNYHHAHDAYLNAVVGTALIKKYPKLESEFVYGDYKVYDVRKMIAKSEQEIGKATAKYFFYSNIMNFFKTEITLANGEIRKRPLIETNGETGEIVWDKGRDFATVRKVLSMPQVNIVKKTEVQTGGFSKESILPKRNSDKLIARKKDWDPKKYGGFVSPTVAYSVLVVAKVEKGKSKKLKSVKELLGITIMERSSFEKNPIDFLEAKGYKEVKKDLIIKLPKYSLFELENGRKRMLASARELQKGNELALPSKYVNFLYLASHYEKLKGSPEDNEQKQLFVEQHKHYLDEIIEQISEFSKRVILADANLDKVLSAYNKHRDKPIREQAENIIHLFTLTNLGAPAAFKYFDTTIDRKEYRSTKEVLDATLIHQSITGLYETRIDLSQLGGDSGGSSGGSSGSETPGTSESATPESSGGSSGGSSTLNIEDEYRLHETSKEPDVSLGSTWLSDFPQAWAETGGMGLAVRQAPLIIPLKATSTPVSIKQYPMSQEARLGIKPHIQRLLDQGILVPCQSPWNTPLLPVKKPGTNDYRPVQDLREVNKRVEDIHPTVPNPYNLLSGLPPSHQWYTVLDLKDAFFCLRLHPTSQPLFAFEWRDPEMGISGQLTWTRLPQGFKNSPTLFNEALHRDLADFRIQHPDLILLQYVDDLLLAATSELDCQQGTRALLQTLGNLGYRASAKKAQICQKQVKYLGYLLKEGQRWLTEARKETVMGQPTPKTPRQLREFLGKAGFCRLFIPGFAEMAAPLYPLTKPGTLFNWGPDQQKAYQEIKQALLTAPALGLPDLTKPFELFVDEKQGYAKGVLTQKLGPWRRPVAYLSKKLDPVAAGWPPCLRMVAAIAVLTKDAGKLTMGQPLVILAPHAVEALVKQPPDRWLSNARMTHYQALLLDTDRVQFGPVVALNPATLLPLPEEGLQHNCLDILAEAHGTRPDLTDQPLPDADHTWYTDGSSLLQEGQRKAGAAVTTETEVIWAKALPAGTSAQRAELIALTQALKMAEGKKLNVYTDSRYAFATAHIHGEIYRRRGWLTSEGKEIKNKDEILALLKALFLPKRLSIIHCPGHQKGHSAEARGNRMADQAARKAAITETPDTSTLLIENSSPSGGSKRTADGSEFEPKKKRKV

SEQ ID NO: 117 - protein, 1943 aa, Artificial Sequence
  Synthetic
MKRTADGSEFESPKKKRKVDKKYSIGLDIGTNSVGWAVITDEYKVPSKKFKVLGNTDRHSIKKNLIGALLFDSGETAEATRLKRTARRRYTRRKNRICYLQEIFSNEMAKVDDSFFHRLEESFLVEEDKKHERHPIFGNIVDEVAYHEKYPTIYHLRKKLVDSTDKADLRLIYLALAHMIKFRGHFLIEGDLNPDNSDVDKLFIQLVQTYNQLFEENPINASGVDAKAILSARLSKSRRLENLIAQLPGEKKNGLFGNLIALSLGLTPNFKSNFDLAEDAKLQLSKDTYDDDLDNLLAQIGDQYADLFLAAKNLSDAILLSDILRVNTEITKAPLSASMIKRYDEHHQDLTLLKALVRQQLPEKYKEIFFDQSKNGYAGYIDGGASQEEFYKFIKPILEKMDGTEELLVKLNREDLLRKQRTFDNGSIPHQIHLGELHAILRRQEDFYPFLKDNREKIEKILTFRIPYYVGPLARGNSRFAWMTRKSEETITPWNFEEVVDKGASAQSFIERMTNFDKNLPNEKVLPKHSLLYEYFTVYNELTKVKYVTEGMRKPAFLSGEQKKAIVDLLFKTNRKVTVKQLKEDYFKKIECFDSVEISGVEDRFNASLGTYHDLLKIIKDKDFLDNEENEDILEDIVLTLTLFEDREMIEERLKTYAHLFDDKVMKQLKRRRYTGWGRLSRKLINGIRDKQSGKTILDFLKSDGFANRNFMQLIHDDSLTFKEDIQKAQVSGQGDSLHEHIANLAGSPAIKKGILQTVKVVDELVKVMGRHKPENIVIEMARENQTTQKGQKNSRERMKRIEEGIKELGSQILKEHPVENTQLQNEKLYLYYLQNGRDMYVDQELDINRLSDYDVDAIVPQSFLKDDSIDNKVLTRSDKNRGKSDNVPSEEVVKKMKNYWRQLLNAKLITQRKFDNLTKAERGGLSELDKAGFIKRQLVETRQITKHVAQILDSRMNTKYDENDKLIREVKVITLKSKLVSDFRKDFQFYKVREINNYHHAHDAYLNAVVGTALIKKYPKLESEFVYGDYKVYDVRKMIAKSEQEIGKATAKYFFYSNIMNFFKTEITLANGEIRKRPLIETNGETGEIVWDKGRDFATVRKVLSMPQVNIVKKTEVQTGGFSKESILPKRNSDKLIARKKDWDPKKYGGFDSPTVAYSVLVVAKVEKGKSKKLKSVKELLGITIMERSSFEKNPIDFLEAKGYKEVKKDLIIKLPKYSLFELENGRKRMLASAGELQKGNELALPSKYVNFLYLASHYEKLKGSPEDNEQKQLFVEQHKHYLDEIIEQISEFSKRVILADANLDKVLSAYNKHRDKPIREQAENIIHLFTLTNLGAPAAFKYFDTTIDRKRYTSTKEVLDATLIHQSITGLYETRIDLSQLGGDSGGSSGGSSGSETPGTSESATPESSGGSSGGSSTLNIEDEYRLHETSKEPDVSLGSTWLSDFPQAWAETGGMGLAVRQAPLIIPLKATSTPVSIKQYPMSQEARLGIKPHIQRLLDQGILVPCQSPWNTPLLPVKKPGTNDYRPVQDLREVNKRVEDIHPTVPNPYNLLSGLPPSHQWYTVLDLKDAFFCLRLHPTSQPLFAFEWRDPEMGISGQLTWTRLPQGFKNSPTLFNEALHRDLADFRIQHPDLILLQYVDDLLLAATSELDCQQGTRALLQTLGNLGYRASAKKAQICQKQVKYLGYLLKEGQRWLTEARKETVMGQPTPKTPRQLREFLGKAGFCRLFIPGFAEMAAPLYPLTKPGTLFNWGPDQQKAYQEIKQALLTAPALGLPDLTKPFELFVDEKQGYAKGVLTQKLGPWRRPVAYLSKKLDPVAAGWPPCLRMVAAIAVLTKDAGKLTMGQPLVILAPHAVEALVKQPPDRWLSNARMTHYQALLLDTDRVQFGPVVALNPATLLPLPEEGLQHNCLDNSRLINSGGSKRTADGSEFEPKKKRKV

SEQ ID NO: 118 - protein, 5 aa, Artificial Sequence
  Synthetic
  REPEAT (1)..(5): may repeat up to 30 times
GGGGS

SEQ ID NO: 119 - protein, 1 aa, Artificial Sequence
  Synthetic
  REPEAT (1)..(1): may repeat up to 30 times
G

SEQ ID NO: 120 - protein, 5 aa, Artificial Sequence
  Synthetic
  REPEAT (1)..(5): may repeat up to 30 times
EAAAK

SEQ ID NO: 121 - protein, 3 aa, Artificial Sequence
  Synthetic
  REPEAT (1)..(3): may repeat up to 30 times
GGS

SEQ ID NO: 122 - protein, 4 aa, Artificial Sequence
  Synthetic
  REPEAT (1)..(4): may repeat up to 30 times
SGGS

SEQ ID NO: 123 - protein, 2 aa, Artificial Sequence
  Synthetic
  misc_feature (1)..(1): Xaa can be any naturally occurring amino acid
  REPEAT (1)..(2): may repeat up to 30 times
XP

SEQ ID NO: 124 - protein, 16 aa, Artificial Sequence
  Synthetic
SGSETPGTSESATPES

SEQ ID NO: 125 - protein, 32 aa, Artificial Sequence
  Synthetic
SGGSSGGSSGSETPGTSESATPESSGGSSGGS

SEQ ID NO: 126 - protein, 10 aa, Artificial Sequence
  Synthetic
SGGSGGSGGS

SEQ ID NO: 127 - protein, 4 aa, Artificial Sequence
  Synthetic
SGGS

SEQ ID NO: 128 - protein, 60 aa, Artificial Sequence
  Synthetic
SGGSSGGSSGSETPGTSESATPESAGSYPYDVPDYAGSAAPAAKKKKLDGSGSGGSSGGS

SEQ ID NO: 129 - protein, 3 aa, Artificial Sequence
  Synthetic
GGS

SEQ ID NO: 130 - protein, 6 aa, Artificial Sequence
  Synthetic
GGSGGS

SEQ ID NO: 131 - protein, 9 aa, Artificial Sequence
  Synthetic
GGSGGSGGS

SEQ ID NO: 132 - protein, 7 aa, Artificial Sequence
  Synthetic
PKKKRKV

SEQ ID NO: 133 - protein, 20 aa, Artificial Sequence
  Synthetic
AVKRPAATKKAGQAKKKKLD

SEQ ID NO: 134 - protein, 25 aa, Artificial Sequence
  Synthetic
MSRRRKANPTKLSENAKKLAKEVEN

SEQ ID NO: 135 - protein, 9 aa, Artificial Sequence
  Synthetic
PAAKRVKLD

SEQ ID NO: 136 - protein, 9 aa, Artificial Sequence
  Synthetic
KLKIKRPVK

SEQ ID NO: 137 - protein, 8 aa, Artificial Sequence
  Synthetic
VSRKRPRP

SEQ ID NO: 138 - protein, 10 aa, Artificial Sequence
  Synthetic
EGAPPAKRAR

SEQ ID NO: 139 - protein, 12 aa, Artificial Sequence
  Synthetic
PPQPKKKPLDGE

SEQ ID NO: 140 - protein, 18 aa, Artificial Sequence
  Synthetic
KRTADGSEFESPKKKRKV

SEQ ID NO: 141 - protein, 17 aa, Artificial Sequence
  Synthetic
KRTADGSEFEPKKKRKV

SEQ ID NO: 142 - protein, 19 aa, Artificial Sequence
  Synthetic
NLSKRPAAIKKAGQAKKKK

SEQ ID NO: 143 - protein, 11 aa, Artificial Sequence
  Synthetic
RQRRNELKRSF

SEQ ID NO: 144 - protein, 38 aa, Artificial Sequence
  Synthetic
NQSSNFGPMKGGNFGGRSSGPYGGGGQYFAKPRNQGGY

SEQ ID NO: 145 - protein, 16 aa, Artificial Sequence
  Synthetic
  misc_feature (3)..(12): Xaa can be any naturally occurring amino acid
KRXXXXXXXXXXKKKK

SEQ ID NO: 146 - protein, 380 aa, Homo sapiens
MGIQGLAKLIADVAPSAIRENDIKSYFGRKVAIDASMSIYQFLIAVRQGGDVLQNEEGETTSHLMGMFYRTIRMMENGIKPVYVFDGKPPQLKSGELAKRSERRAEAEKQLQQAQAAGAEQEVEKFTKRLVKVTKQHNDECKHLLSLMGIPYLDAPSEAEASCAALVKAGKVYAAATEDMDCLTFGSPVLMRHLTASEAKKLPIQEFHLSRILQELGLNQEQFVDLCILLGSDYCESIRGIGPKRAVDLIQKHKSIEEIVRRLDPNKYPVPENWLHKEAHQLFLEPEVLDPESVELKWSEPNEEELIKFMCGEKQFSEERIRSGVKRLSKSRQGSTQGRLDDFFKVTGSLSSAKRKEPEPKGSTKKKAKTGAAGKFKRGK

SEQ ID NO: 147 - protein, 380 aa, Artificial Sequence
  Synthetic
MGIQGLAKLIADVAPSAIRENDIKSYFGRKVAIDASMSIYQFLIAVRQGGDVLQNEEGETTSHLMGMFYRTIRMMENGIKPVYVFDGKPPQLKSGELAKRSERRAEAEKQLQQAQAAGAEQEVEKFTKRLVKVTKQHNDECKHLLSLMGIPYLDAPSEAEASCAALVRAGKVYAAATEDMDCLTFGSPVLMRHLTASEAKKLPIQEFHLSRILQELGLNQEQFVDLCILLGSDYCESIRGIGPKRAVDLIQKHKSIEEIVRRLDPNKYPVPENWLHKEAHQLFLEPEVLDPESVELKWSEPNEEELIKFMCGEKQFSEERIRSGVKRLSKSRQGSTQGRLDDFFKVTGSLSSAKRKEPEPKGSTKKKAKTGAAGKFKRGK

SEQ ID NO: 148 - protein, 380 aa, Artificial Sequence
  Synthetic
MGIQGLAKLIADVAPSAIRENDIKSYFGRKVAIDASMSIYQFLIAVRQGGDVLQNEEGETTSHLMGMFYRTIRMMENGIKPVYVFDGKPPQLKSGELAKRSERRAEAEKQLQQAQAAGAEQEVEKFTKRLVKVTKQHNDECKHLLSLMGIPYLDAPSEAEASCAALVKAGKVYAAATEDMDCLTFGAPVLMRHLTASEAKKLPIQEFHLSRILQELGLNQEQFVDLCILLGSDYCESIRGIGPKRAVDLIQKHKSIEEIVRRLDPNKYPVPENWLHKEAHQLFLEPEVLDPESVELKWSEPNEEELIKFMCGEKQFSEERIRSGVKRLSKSRQGSTQGRLDDFFKVTGSLSSAKRKEPEPKGSTKKKAKTGAAGKFKRGK

SEQ ID NO: 149 - protein, 380 aa, Artificial Sequence
  Synthetic
MGIQGLAKLIADVAPSAIRENDIKSYFGRKVAIDASMSIYQFLIAVRQGGDVLQNEEGETTSHLMGMFYRTIRMMENGIKPVYVFDGKPPQLKSGELAKRSERRAEAEKQLQQAQAAGAEQEVEKFTKRLVKVTKQHNDECKHLLSLMGIPYLDAPSEAEASCAALVKAGKVYAAATEDMDCLTFGSPVLMRHLTASEAKKLPIQEFHLSRILQELGLNQEQFVDLCILLGSDYCESIRGIGPKRAVDLIQKHKSIEEIVRRLDPNKYPVPENWLHKEAHQLFLEPEVLDPESVELKWSEPNEEELIKFMCGEKQFSEERIRSGVKRLSKSRQGSTQGRLDDFFKVTGSLSSARRKEPEPKGSTKKKAKTGAAGKFKRGK

SEQ ID NO: 150 - protein, 908 aa, Artificial Sequence
  Synthetic
MGVNDLWQILEPVKQHIPLRNLGGKTIAVDLSLWVCEAQTVKKMMGSVMKPHLRNLFFRISYLTQMDVKLVFVMEGEPPKLKADVISKRNQSRYGSSGKSWSQKTGRSHFKSVLRECLHMLECLGIPWVQAAGEAEAMCAYLNAGGHVDGCLTNDGDTFLYGAQTVYRNFTMNTKDPHVDCYTMSSIKSKLGLDRDALVGLAILLGCDYLPKGVPGVGKEQALKLIQILKGQSLLQRFNRWNETSCNSSPQLLVTKKLAHCSVCSHPGSPKDHERNGCRLCKSDKYCEPHDYEYCCPCEWHRTEHDRQLSEVENNIKKKACCCEGFPFHEVIQEFLLNKDKLVKVIRYQRPDLLLFQRFTLEKMEWPNHYACEKLLVLLTHYDMIERKLGSRNSNQLQPIRIVKTRIRNGVHCFEIEWEKPEHYAMEDKQHGEFALLTIEEESLFEAAYPEIVAVYQKQKLEIKGKKQKRIKPKENNLPEPDEVMSFQSHMTLKPTCEIFHKQNSKLNSGISPDPTLPQESISASLNSLLLPKNTPCLNAQEQFMSSLRPLAIQQIKAVSKSLISESSQPNTSSHNISVIADLHLSTIDWEGTSFSNSPAIQRNTFSHDLKSEVESELSAIPDGFENIPEQLSCESERYTANIKKVLDEDSDGISPEEHLLSGITDLCLQDLPLKERIFTKLSYPQDNLQPDVNLKTLSILSVKESCIANSGSDCTSHLSKDLPGIPLQNESRDSKILKGDQLLQEDYKVNTSVPYSVSNTVVKTCNVRPPNTALDHSRKVDMQTTRKILMKKSVCLDRHSSDEQSAPVFGKAKYTTQRMKHSSQKHNSSHFKESGHNKLSSPKIHIKETEQCVRSYETAENEESCFPDSTKSSLSSLQCHKKENNSGTCLDSPLPLRQRLKLRFQST

SEQ ID NO: 151 - protein, 1186 aa, Artificial Sequence
  Synthetic
MGVQGLWKLLECSGRQVSPEALEGKILAVDISIWLNQALKGVRDRHGNSIENPHLLTLFHRLCKLLFFRIRPIFVFDGDAPLLKKQTLVKRRQRKDLASSDSRKTTEKLLKTFLKRQAIKTAFRSKRDEALPSLTQVRRENDLYVLPPLQEEEKHSSEEEDEKEWQERMNQKQALQEEFFHNPQAIDIESEDFSSLPPEVKHEILTDMKEFTKRRRTLFEAMPEESDDFSQYQLKGLLKKNYLNQHIEHVQKEMNQQHSGHIRRQYEDEGGFLKEVESRRVVSEDTSHYILIKGIQAKTVAEVDSESLPSSSKMHGMSFDVKSSPCEKLKTEKEPDATPPSPRTLLAMQAALLGSSSEEELESENRRQARGRNAPAAVDEGSISPRTLSAIKRALDDDEDVKVCAGDDVQTGGPGAEEMRINSSTENSDEGLKVRDGKGIPFTATLASSSVNSAEEHVASTNEGREPTDSVPKEQMSLVHVGTEAFPISDESMIKDRKDRLPLESAVVRHSDAPGLPNGRELTPASPTCTNSVSKNETHAEVLEQQNELCPYESKFDSSLLSSDDETKCKPNSASEVIGPVSLQETSSIVSVPSEAVDNVENVVSFNAKEHENFLETIQEQQTTESAGQDLISIPKAVEPMEIDSEESESDGSFIEVQSVISDEELQAEFPETSKPPSEQGEEELVGTREGEAPAESESLLRDNSERDDVDGEPQEAEKDAEDSLHEWQDINLEELETLESNLLAQQNSLKAQKQQQERIAATVTGQMFLESQELLRLFGIPYIQAPMEAEAQCAILDLTDQTSGTITDDSDIWLFGARHVYRNFFNKNKFVEYYQYVDFHNQLGLDRNKLINLAYLLGSDYTEGIPTVGCVTAMEILNEFPGHGLEPLLKFSEWWHEAQKNPKIRPNPHDTKVKKKLRTLQLTPGFPNPAVAEAYLKPVVDDSKGSFLWGKPDLDKIREFCQRYFGWNRTKTDESLFPVLKQLDAQQTQLRIDSFFRLAQQEKEDAKRIKSQRLNRAVTCMLRKEKEAAASEIEAVSVAMEKEFELLDKAKRKTQKRGITNTLEESSSLKRKRLSDSKRKNTCGGFLGETCLSESSDGSSSEDAESSSLMNVQRRTAAKEPKTSASDSQNSVKEAPVKNGGATTSSSSDSDDDGGKEKMVLVTARSVFGKKRRKLRRARGRKRKT

SEQ ID NO: 152 - protein, 236 aa, Homo sapiens
MSEAPRAETFVFLDLEATGLPSVEPEIAELSLFAVHRSSLENPEHDESGALVLPRVLDKLTLCMCPERPFTAKASEITGLSSEGLARCRKAGFDGAVVRTLQAFLSRQAGPICLVAHNGFDYDFPLLCAELRRLGARLPRDTVCLDTLPALRGLDRAHSHGTRARGRQGYSLGSLFHRYFRAEPSAAHSAEGDVHTLLLIFLHRAAELLAWADEQARGWAHIEPMYLPPDDPSLEA

SEQ ID NO: 153 - protein, 236 aa, Mus musculus
MSEPPRAETFVFLDLEATGLPNMDPEIAEISLFAVHRSSLENPERDDSGSLVLPRVLDKLTLCMCPERPFTAKASEITGLSSESLMHCGKAGFNGAVVRTLQGFLSRQEGPICLVAHNGFDYDFPLLCTELQRLGAHLPQDTVCLDTLPALRGLDRAHSHGTRAQGRKSYSLASLFHRYFQAEPSAAHSAEGDVHTLLLIFLHRAPELLAWADEQARSWAHIEPMYVPPDGPSLEA

SEQ ID NO: 154 - protein, 236 aa, Rattus norvegicus
MSEPLRAETFVFLDLEATGLPNMDPEIAEISLFAVHRSSLENPERDDSGSLVLPRVLDKLTLCMCPERPFTAKASEITGLSSEGLMNCRKAAFNDAVVRTLQGFLSRQEGPICLVAHNGFDYDFPLLCTELQRLGAHLPRDTVCLDTLPALRGLDRVHSHGTRAQGRKSYSLASLFHRYFQAEPSAAHSAEGDVNTLLLIFLHRAPELLAWADEQARSWAHIEPMYVPPDGPSLEA

SEQ ID NO: 155 - protein, 803 aa, Homo sapiens
MGIQGLLQFIKEASEPIHVRKYKGQVVAVDTYCWLHKGAIACAEKLAKGEPTDRYVGFCMKFVNMLLSHGIKPILVFDGCTLPSKKEVERSRRERRQANLLKGKQLLREGKVSEARECFTRSINITHAMAHKVIKAARSQGVDCLVAPYEADAQLAYLNKAGIVQAIITEDSDLLAFGCKKVILKMDQFGNGLEIDQARLGMCRQLGDVFTEEKFRYMCILSGCDYLSSLRGIGLAKACKVLRLANNPDIVKVIKKIGHYLKMNITVPEDYINGFIRANNTFLYQLVFDPIKRKLIPLNAYEDDVDPETLSYAGQYVDDSIALQIALGNKDINTFEQIDDYNPDTAMPAHSRSHSWDDKTCQKSANVSSIWHRNYSPRPESGTVSDAPQLKENPSTVGVERVISTKGLNLPRKSSIVKRPRSAELSEDDLLSQYSLSFTKKTKKNSSEGNKSLSFSEVFVPDLVNGPTNKKSVSTPPRTRNKFATFLQRKNEESGAVVVPGTRSRFFCSSDSTDCVSNKVSIQPLDETAVTDKENNLHESEYGDQEGKRLVDTDVARNSSDDIPNNHIPGDHIPDKATVFTDEESYSFESSKFTRTISPPTLGTLRSCFSWSGGLGDFSRTPSPSPSTALQQFRRKSDSPTSLPENNMSDVSQLKSEESSDDESHPLREEACSSQSQESGEFSLQSSNASKLSQCSSKDSDSEESDCNIKLLDSQSDQTSKLRLSHFSKKDTPLRNKVPGLYKSSSADSLSTTKIKPLGPARASGLSKKPASIQKRKHHNAENKPGLQIKLNELWKNFGFKKF

SEQ ID NO: 156 - protein, 846 aa, Homo sapiens
MGIQGLLQFIKEASEPIHVRKYKGQVVAVDTYCWLHKGAIACAEKLAKGEPTDRYVGFCMKFVNMLLSHGIKPILVFDGCTLPSKKEVERSRRERRQANLLKGKQLLREGKVSEARECFTRSINITHAMAHKVIKAARSQGVDCLVAPYEADAQLAYLNKAGIVQAIITEDSDLLAFGCKKVILKMDQFGNGLEIDQARLGMCRQLGDVFTEEKFRYMCILSGCDYLSSLRGIGLAKACKVLRLANNPDIVKVIKKIGHYLKMNITVPEDYINGFIRANNTFLYQLVFDPIKRKLIPLNAYEDDVDPETLSYAGQYVDDSIALQIALGNKDINTFEQIDDYNPDTAMPAHSRSHSWDDKTCQKSANVSSIWHRNYSPRPESGTVSDAPQLKENPSTVGVERVISTKGLNLPRKSSIVKRPRSAELSEDDLLSQYSLSFTKKTKKNSSEGNKSLSFSEVFVPDLVNGPTNKKSVSTPPRTRNKFATFLQRKNEESGAVVVPGTRSRFFCSSDSTDCVSNKVSIQPLDETAVTDKENNLHESEYGDQEGKRLVDTDVARNSSDDIPNNHIPGDHIPDKATVFTDEESYSFESSKFTRTISPPTLGTLRSCFSWSGGLGDFSRTPSPSPSTALQQFRRKSDSPTSLPENNMSDVSQLKSEESSDDESHPLREEACSSQSQESGEFSLQSSNASKLSQCSSKDSDSEESDCNIKLLDSQSDQTSKLRLSHFSKKDTPLRNKVPGLYKSSSADSLSTTKIKPLGPARASGLSKKPASIQKRKHHNAENKPGLQIKLNELWKNFGFKKDSEKLPPCKKPLSPVRDNIQLTPEAEEDIFNKPECGRVQRAIFQ

SEQ ID NO: 157 - protein, 845 aa, Homo sapiens
MGIQGLLQFIKEASEPIHVRKYKGQVVAVDTYCWLHKGAIACAEKLAKGEPTDRYVGFCMKFVNMLLSHGIKPILVFDGCTLPSKKEVERSRRERRQANLLKGKQLLREGKVSEARECFTRSINITHAMAHKVIKAARSQGVDCLVAPYEADAQLAYLNKAGIVQAIITEDSDLLAFGCKKVILKMDQFGNGLEIDQARLGMCRQLGDVFTEEKFRYMCILSGCDYLSSLRGIGLAKACKVLRLANNPDIVKVIKKIGHYLKMNITVPEDYINGFIRANNTFLYQLVFDPIKRKLIPLNAYEDDVDPETLSYAGQYVDDSIALQIALGNKDINTFEQIDDYNPDTAMPAHSRSHSWDDKTCQKSANVSSIWHRNYSPRPESGTVSDAPQLKENPSTVGVERVISTKGLNLPRKSSIVKRPRSELSEDDLLSQYSLSFTKKTKKNSSEGNKSLSFSEVFVPDLVNGPTNKKSVSTPPRTRNKFATFLQRKNEESGAVVVPGTRSRFFCSSDSTDCVSNKVSIQPLDETAVTDKENNLHESEYGDQEGKRLVDTDVARNSSDDIPNNHIPGDHIPDKATVFTDEESYSFESSKFTRTISPPTLGTLRSCFSWSGGLGDFSRTPSPSPSTALQQFRRKSDSPTSLPENNMSDVSQLKSEESSDDESHPLREEACSSQSQESGEFSLQSSNASKLSQCSSKDSDSEESDCNIKLLDSQSDQTSKLRLSHFSKKDTPLRNKVPGLYKSSSADSLSTTKIKPLGPARASGLSKKPASIQKRKHHNAENKPGLQIKLNELWKNFGFKKDSEKLPPCKKPLSPVRDNIQLTPEAEEDIFNKPECGRVQRAIFQ

SEQ ID NO: 158 - protein, 413 aa, Artificial Sequence
  Synthetic
CLAEGTRIFDPVTGTTHRIEDVVDGRKPIHVVAAAKDGTLLARPVVSWFDQGTRDVIGLRIAGGAIVWATPDHKVLTEYGWRAAGELRKGDRVAGPGGSGNSLALSLTADQMVSALLDAEPPILYSEYDPTSPFSEASMMGLLTNLADRELVHMINWAKRVPGFVDLTLHDQAHLLECAWLEILMIGLVWRSMEHPGKLLFAPNLLLDRNQGKCVEGMVEIFDMLLATSSRFRMMNLQGEEFVCLKSIILLNSGVYTFLSSTLKSLEEKDHIHRALDKITDTLIHLMAKAGLTLQQQHQRLAQLLLILSHIRHMSNKGMEHLYSMKYKNVVPLYDLLLEMLDAHRLHAGGSGASRVQAFADALDDKFLHDMLAEELRYSVIREVLPTRRARTFDLEVEELHTLVAEGVVVHNC

SEQ ID NO: 159 - protein, 413 aa, Artificial Sequence
  Synthetic
CLAEGTRIFDPVTGTTHRIEDVVDGRKPIHVVAVAKDGTLLARPVVSWFDQGTRDVIGLRIAGGAIVWATPDHKVLTEYGWRAAGELRKGDRVAGPGGSGNSLALSLTADQMVSALLDAEPPILYSEYDPTSPFSEASMMGLLTNLADRELVHMINWAKRVPGFVDLTLHDQAHLLECAWLEILMIGLVWRSMEHPGKLLFAPNLLLDRNQGKCVEGMVEIFDMLLATSSRFRMMNLQGEEFVCLKSIILLNSGVYTFLSSTLKSLEEKDHIHRALDKITDTLIHLMAKAGLTLQQQHQRLAQLLLILSHIRHMSNKGMEHLYSMKYTNVVPLYDLLLEMLDAHRLHAGGSGASRVQAFADALDDKFLHDMLAEELRYSVIREVLPTRRARTFDLEVEELHTLVAEGVVVHNC

SEQ ID NO: 160 - protein, 413 aa, Artificial Sequence
  Synthetic
CLAEGTRIFDPVTGTTHRIEDVVDGRKPIHVVAAAKDGTLLARPVVSWFDQGTRDVIGLRIAGGATVWATPDHKVLTEYGWRAAGELRKGDRVAGPGGSGNSLALSLTADQMVSALLDAEPPIPYSEYDPTSPFSEASMMGLLTNLADRELVHMINWAKRVPGFVDLTLHDQAHLLECAWLEILMIGLVWRSMEHPGKLLFAPNLLLDRNQGKCVEGMVEIFDMLLATSSRFRMMNLQGEEFVCLKSIILLNSGVYTFLSSTLKSLEEKDHIHRALDKITDTLIHLMAKAGLTLQQQHQRLAQLLLILSHIRHMSNKGMEHLYSMKYKNVVPLYDLLLEMLDAHRLHAGGSGASRVQAFADALDDKFLHDMLAEGLRYSVIREVLPTRRARTFDLEVEELHTLVAEGVVVHNC

SEQ ID NO: 161 - protein, 413 aa, Artificial Sequence
  Synthetic
CLAEGTRIFDPVTGTTHRIEDVVDGRKPIHVVAAAKDGTLLARPVVSWFDQGTRDVIGLRIAGGATVWATPDHKVLTEYGWRAAGELRKGDRVAGPGGSGNSLALSLTADQMVSALLDAEPPILYSEYDPTSPFSEASMMGLLTNLADRELVHMINWAKRVPGFVDLTLHDQAHLLECAWLEILMIGLVWRSMEHPGKLLFAPNLLLDRNQGKCVEGMVEIFDMLLATSSRFRMMNLQGEEFVCLKSIILLNSGVYTFLSSTLKSLEEKDHIHRALDKITDTLIHLMAKAGLTLQQQHQRLAQLLLILSHIRHMSNKGMEHLYSMKYKNVVPLYDLLLEMLDAHRLHAGGSGASRVQAFADALDDKFLHDMLAEELRYSVIREVLPTRRARTFDLEVEELHTLVAEGVVVHNC

SEQ ID NO: 162 - protein, 413 aa, Artificial Sequence
  Synthetic
CLAEGTRIFDPVTGTTHRIEDVVDGRKPIHVVAAAKDGTLLARPVVSWFDQGTRDVIGLRIAGGATVWATPDHKVLTEYGWRAAGELRKGDRVAGPGGSGNSLALSLTADQMVSALLDAEPPIPYSEYDPTSPFSEASMMGLLTNLADRELVHMINWAKRVPGFVDLTLHDQAHLLECAWLEILMIGLVWRSMEHPGKLLFAPNLLLDRNQGKCVEGMVEIFDMLLATSSRFRMMNLQGEEFVCLKSIILLNSGVYTFLSSTLKSLEEKDHIHRALDKITDTLIHLMAKAGLTLQQQHQRLAQLLLILSHIRHMSNKGMEHLYSMKYKNVVPLYDLLLEMLDAHRLHAGGSGASRVQAFADALDDKFLHDMLAEELRYSVIREVLPTRRARTFDLEVEELHTLVAEGVVVHNC

SEQ ID NO: 163 - protein, 413 aa, Artificial Sequence
  Synthetic
CLAEGTRIFDPVTGTTHRIEDVVDGRKPIHVVAAAKDGTLLARPVVSWFDQGTRDVIGLRIAGGATVWATPDHKVLTEYGWRAAGELRKGDRVAGPGGSGNSLALSLTADQMVSALLDAEPPILYSEYNPTSPFSEASMMGLLTNLADRELVHMINWAKRVPGFVDLTLHDQAHLLERAWLEILMIGLVWRSMEHPGKLLFAPNLLLDRNQGKCVEGMVEIFDMLLATSSRFRMMNLQGEEFVCLKSIILLNSGVYTFLSSTLKSLEEKDHIHRALDKITDTLIHLMAKAGLTLQQQHQRLAQLLLILSHIRHMSNKGMEHLYSMKYKNVVPLYDLLLEMLDAHRLHAGGSGASRVQAFADALDDKFLHDMLAEGLRYSVIREVLPTRRARTFDLEVEELHTLVAEGVVVHNC

SEQ ID NO: 164 - protein, 413 aa, Artificial Sequence
  Synthetic
CLAEGTRIFDPVTGTTHRIEDVVDGRKPIHVVAAAKDGTLLARPVVSWFDQGTRDVIGLRIAGGAIVWATPDHKVLTEYGWRAAGELRKGDRVAGPGGSGNSLALSLTADQMVSALLDAEPPILYSEYDPTSPFSEASMMGLLTNLADRELVHMINWAKRVPGFVDLTLHDQAHLLERAWLEILMIGLVWRSMEHPGKLLFAPNLLLDRNQGKCVEGMVEIFDMLLATSSRFRMMNLQGEEFVCLKSIILLNSGVYTFLSSTLKSLEEKDHIHRALDKITDTLIHLMAKAGLTLQQQHQRLAQLLLILSHIRHMSNKGMEHLYSMKYKNVVPLYDLLLEMLDAHRLHAGGSGASRVQAFADALDDKFLHDMLAEGLRYSVIREVLPTRRARTFDLEVEELHTLVAEGVVVHNC

SEQ ID NO: 165 - protein, 413 aa, Artificial Sequence
  Synthetic
CLAEGTRIFDPVTGTTHRIEDVVDGRKPIHVVAVAKDGTLLARPVVSWFDQGTRDVIGLRIAGGATVWATPDHKVLTEYGWRAAGELRKGDRVAGPGGSGNSLALSLTADQMVSALLDAEPPILYSEYDPTSPFSEASMMGLLTNLADRELVHMINWAKRVPGFVDLTLHDQAHLLERAWLEILMIGLVWRSMEHPGKLLFAPNLLLDRNQGKCVEGMVEIFDMLLATSSRFRMMNLQGEEFVCLKSIILLNSGVYTFLSSTLKSLEEKDHIHRALDKITDTLIHLMAKAGLTLQQQHQRLAQLLLILSHIRHMSNKGMEHLYSMKYKNVVPLYDLLLEMLDAHRLHAGGSGASRVQAFADALDDKFLHDMLAEELRYSVIREVLPTRRARTFDLEVEELHTLVAEGVVVHNC

SEQ ID NO: 166 - DNA, 33 bp, Artificial Sequence
  Synthetic
gccaacatgaggatcacccatgtctgcagggcc

SEQ ID NO: 167 - protein, 131 aa, Artificial Sequence
  Synthetic
GSASNFTQFVLVDNGGTGDVTVAPSNFANGVAEWISSNSRSQAYKVTCSVRQSSAQNRKYTIKVEVPKVATQTVGGEELPVAGWRSYLNMELTIPIFATNSDCELIVKAMQGLLKDGNPIPSAIAANSGIY

SEQ ID NO: 168 - protein, 84 aa, Artificial Sequence
  Synthetic
MTNLSDIIEKETGKQLVIQESILMLPEEVEEVIGNKPESDILVHTAYDESTDENVMLLTSDAPEYKPWALVIQDSNGENKIKML

SEQ ID NO: 169 - protein, 345 aa, Artificial Sequence
  Synthetic
MPARALLPRRMGHRTLASTPALWASIPCPRSELRLDLVLPSGQSFRWREQSPAHWSGVLADQVWTLTQTEEQLHCTVYRGDKSQASRPTPDELEAVRKYFQLDVTLAQLYHHWGSVDSHFQEVAQKFQGVRLLRQDPIECLFSFICSSNNNIARITGMVERLCQAFGPRLIQLDDVTYHGFPSLQALAGPEVEAHLRKLGLGYRARYVSASARAILEEQGGLAWLQQLRESSYEEAHKALCILPGVGTKVADCICLMALDKPQAVPVDVHMWHIAQRDYSWHPTTSQAKGPSPQTNKELGNFFRSLWGPYAGWAQAVLFSADLRQSRHAQEPPAKRRKGSKGPEG

SEQ ID NO: 170 - protein, 298 aa, Artificial Sequence
  Synthetic
MVTPALQMKKPKQFCRRMGQKKQRPARAGQPHSSSDAAQAPAEQPHSSSDAAQAPCPRERCLGPPTTPGPYRSIYFSSPKGHLTRLGLEFFDQPAVPLARAFLGQVLVRRLPNGTELRGRIVETEAYLGPEDEAAHSRGGRQTPRNRGMFMKPGTLYVYIIYGMYFCMNISSQGDGACVLLRALEPLEGLETMRQLRSTLRKGTASRVLKDRELCSGPSKLCQALAINKSFDQRDLAQDEAVWLERGPLEPSEPAVVAAARVGVGHAGEWARKPLRFYVRGSPWVSVVDRVAEQDTQA

SEQ ID NO: 171 - protein, 580 aa, Artificial Sequence
  Synthetic
MGTTGLESLSLGDRGAAPTVTSSERLVPDPPNDLRKEDVAMELERVGEDEEQMMIKRSSECNPLLQEPIASAQFGATAGTECRKSVPCGWERVVKQRLFGKTAGRFDVYFISPQGLKFRSKSSLANYLHKNGETSLKPEDFDFTVLSKRGIKSRYKDCSMAALTSHLQNQSNNSNWNLRTRSKCKKDVFMPPSSSSELQESRGLSNFTSTHLLLKEDEGVDDVNFRKVRKPKGKVTILKGIPIKKTKKGCRKSCSGFVQSDSKRESVCNKADAESEPVAQKSQLDRTVCISDAGACGETLSVTSEENSLVKKKERSLSSGSNFCSEQKTSGIINKFCSAKDSEHNEKYEDTFLESEEIGTKVEVVERKEHLHTDILKRGSEMDNNCSPTRKDFTGEKIFQEDTIPRTQIERRKTSLYFSSKYNKEALSPPRRKAFKKWTPPRSPFNLVQETLFHDPWKLLIATIFLNRTSGKMAIPVLWKFLEKYPSAEVARTADWRDVSELLKPLGLYDLRAKTIVKFSDEYLTKQWKYPIELHGIGKYGNDSYRIFCVNEWKQVHPEDHKLNKYHDWLWENHEKLSLS

SEQ ID NO: 172 - protein, 410 aa, Artificial Sequence
  Synthetic
MEAENAGSYSLQQAQAFYTFPFQQLMAEAPNMAVVNEQQMPEEVPAPAPAQEPVQEAPKGRKRKPRTTEPKQPVEPKKPVESKKSGKSAKSKEKQEKITDTFKVKRKVDRFNGVSEAELLTKTLPDILTFNLDIVIIGINPGLMAAYKGHHYPGPGNHFWKCLFMSGLSEVQLNHMDDHTLPGKYGIGFTNMVERTTPGSKDLSSKEFREGGRILVQKLQKYQPRIAVFNGKCIYEIFSKEVFGVKVKNLEFGLQPHKIPDTETLCYVMPSSSARCAQFPRAQDKVHYYIKLKDLRDQLKGIERNMDVQEVQYTFDLQLAQEDAKKMAVKEEKYDPGYEAAYGGAYGENPCSSEPCGFSSNGLIESVELRGESAFSGIPNGQWMTQSFTDQIPSFSNHCGTQEQEEESHA

SEQ ID NO: 173 - DNA, 23 bp, Artificial Sequence
  Synthetic
  misc_feature (1)..(21): n is a, c, g, or t
nnnnnnnnnnnnnnnnnnnnngg

SEQ ID NO: 174 - DNA, 15 bp, Artificial Sequence
  Synthetic
  misc_feature (1)..(13): n is a, c, g, or t
nnnnnnnnnnnnngg

SEQ ID NO: 175 - DNA, 23 bp, Artificial Sequence
  Synthetic
  misc_feature (1)..(21): n is a, c, g, or t
nnnnnnnnnnnnnnnnnnnnngg

SEQ ID NO: 176 - DNA, 14 bp, Artificial Sequence
  Synthetic
  misc_feature (1)..(12): n is a, c, g, or t
nnnnnnnnnnnngg

SEQ ID NO: 177 - DNA, 27 bp, Artificial Sequence
  Synthetic
  misc_feature (1)..(22): n is a, c, g, or t
nnnnnnnnnnnnnnnnnnnnnnagaaw

SEQ ID NO: 178 - DNA, 19 bp, Artificial Sequence
  Synthetic
  misc_feature (1)..(14): n is a, c, g, or t
nnnnnnnnnnnnnnagaaw

SEQ ID NO: 179 - DNA, 27 bp, Artificial Sequence
  Synthetic
  misc_feature (1)..(22): n is a, c, g, or t
nnnnnnnnnnnnnnnnnnnnnnagaaw

SEQ ID NO: 180 - DNA, 18 bp, Artificial Sequence
  Synthetic
  misc_feature (1)..(13): n is a, c, g, or t
nnnnnnnnnnnnnagaaw

SEQ ID NO: 181 - DNA, 25 bp, Artificial Sequence
  Synthetic
  misc_feature (1)..(21): n is a, c, g, or t
  misc_feature (24)..(24): n is a, c, g, or t
nnnnnnnnnnnnnnnnnnnnnggng

SEQ ID NO: 182 - DNA, 17 bp, Artificial Sequence
  Synthetic
  misc_feature (1)..(13): n is a, c, g, or t
  misc_feature (16)..(16): n is a, c, g, or t
nnnnnnnnnnnnnggng

SEQ ID NO: 183 - DNA, 25 bp, Artificial Sequence
  Synthetic
  misc_feature (1)..(21): n is a, c, g, or t
  misc_feature (24)..(24): n is a, c, g, or t
nnnnnnnnnnnnnnnnnnnnnggng

SEQ ID NO: 184 - DNA, 16 bp, Artificial Sequence
  Synthetic
  misc_feature (1)..(12): n is a, c, g, or t
  misc_feature (15)..(15): n is a, c, g, or t
nnnnnnnnnnnnggng

SEQ ID NO: 185 - DNA, 125 bp, Artificial Sequence
  Synthetic
  misc_feature (1)..(8): n is a, c, g, or t
nnnnnnnngtttttgtactctcaagatttagaaataaatcttgcagaagctacaaagataaggcttcatgccgaaatcaacaccctgtcattttatggcagggtgttttcgttatttaatttttt

SEQ ID NO: 186 - DNA, 121 bp, Artificial Sequence
  Synthetic
  misc_feature (1)..(18): n is a, c, g, or t
nnnnnnnnnnnnnnnnnngtttttgtactctcagaaatgcagaagctacaaagataaggcttcatgccgaaatcaacaccctgtcattttatggcagggtgttttcgttatttaatttttt

SEQ ID NO: 187 - DNA, 109 bp, Artificial Sequence
  Synthetic
  misc_feature (1)..(20): n is a, c, g, or t
nnnnnnnnnnnnnnnnnnnngtttttgtactctcagaaatgcagaagctacaaagataaggcttcatgccgaaatcaacaccctgtcattttatggcagggtgtttttt

SEQ ID NO: 188 - DNA, 102 bp, Artificial Sequence
  Synthetic
  misc_feature (1)..(20): n is a, c, g, or t
nnnnnnnnnnnnnnnnnnnngttttagagctagaaatagcaagttaaaataaggctagtccgttatcaacttgaaaaagtggcaccgagtcggtgctttttt

SEQ ID NO: 189 - DNA, 88 bp, Artificial Sequence
  Synthetic
  misc_feature (1)..(20): n is a, c, g, or t
nnnnnnnnnnnnnnnnnnnngttttagagctagaaatagcaagttaaaataaggctagtccgttatcaacttgaaaaagtgttttttt

SEQ ID NO: 190 - DNA, 76 bp, Artificial Sequence
  Synthetic
  misc_feature (1)..(20): n is a, c, g, or t
nnnnnnnnnnnnnnnnnnnngttttagagctagaaatagcaagttaaaataaggctagtccgttatcatttttttt

SEQ ID NO: 191 - RNA, 82 nt, Artificial Sequence
  Synthetic
guuuuagagcuagaaauagcaaguuaaaauaaaggcuaguccguuaucaacuugaaaaaguggcaccgagucggugcuuuuu

SEQ ID NO: 192 - DNA, 905 bp, Artificial Sequence
  Synthetic
tagttattaatagtaatcaattacggggtcattagttcatagcccatatatggagttccgcgttacataacttacggtaaatggcccgcctggctgaccgcccaacgacccccgcccattgacgtcaataatgacgtatgttcccatagtaacgccaatagggactttccattgacgtcaatgggtggagtatttacggtaaactgcccacttggcagtacatcaagtgtatcatatgccaagtacgccccctattgacgtcaatgacggtaaatggcccgcctggcattatgcccagtacatgaccttatgggactttcctacttggcagtacatctacgtattagtcatcgctattaccatggtgatgcggttttggcagtacatcaatgggcgtggatagcggtttgactcacggggatttccaagtctccaccccattgacgtcaatgggagtttgttttggcaccaaaatcaacgggactttccaaaatgtcgtaacaactccgccccattgacgcaaatgggcggtaggcgtgtacggtgggaggtctatataagcagagctggtttagtgaaccgtcagatcgttcactgccgtataggcagggcccagactgagcacgtgagttttagagctagaaatagcaagttaaaataaggctagtccgttatcaacttgaaaaagtgggaccgagtcggtcctctgccatcaaagcgtgctcagtctgttttagggtcatgaaggtttttcttttcctgagaaaacaacacgtattgttttctcaggttttgctttttggcctttttctagcttaaaaaaaaaaaaagcaaaagatgctggtggttggcactcctggtttccaggacggggttcaaatccctgcggcgtctttgctttgact

SEQ ID NO: 193 - DNA, 942 bp, Artificial Sequence
  Synthetic
tagttattaatagtaatcaattacggggtcattagttcatagcccatatatggagttccgcgttacataacttacggtaaatggcccgcctggctgaccgcccaacgacccccgcccattgacgtcaataatgacgtatgttcccatagtaacgccaatagggactttccattgacgtcaatgggtggagtatttacggtaaactgcccacttggcagtacatcaagtgtatcatatgccaagtacgccccctattgacgtcaatgacggtaaatggcccgcctggcattatgcccagtacatgaccttatgggactttcctacttggcagtacatctacgtattagtcatcgctattaccatggtgatgcggttttggcagtacatcaatgggcgtggatagcggtttgactcacggggatttccaagtctccaccccattgacgtcaatgggagtttgttttggcaccaaaatcaacgggactttccaaaatgtcgtaacaactccgccccattgacgcaaatgggcggtaggcgtgtacggtgggaggtctatataagcagagctggtttagtgaaccgtcagatcgttcactgccgtataggcagggcccagactgagcacgtgagttttagagctagaaatagcaagttaaaataaggctagtccgttatcaacttgaaaaagtgggaccgagtcggtcctctgccatcaaagcgtgctcagtctgttttgttttggctgggtttttccttgttcgcaccggacacctccagtgaccagacggcaaggtttttatcccagtgtatattggaaaaacatgttatacttttgacaatttaacgtgcctagagctcaaattaaactaataccataacgtaatgcaacttacaacataaataaaggtcaatgtttaatccataaaaaaaaaaaaaaaaaaa

SEQ ID NO: 194 - DNA, 1370 bp, Artificial Sequence
  Synthetic
tagttattaatagtaatcaattacggggtcattagttcatagcccatatatggagttccgcgttacataacttacggtaaatggcccgcctggctgaccgcccaacgacccccgcccattgacgtcaataatgacgtatgttcccatagtaacgccaatagggactttccattgacgtcaatgggtggagtatttacggtaaactgcccacttggcagtacatcaagtgtatcatatgccaagtacgccccctattgacgtcaatgacggtaaatggcccgcctggcattatgcccagtacatgaccttatgggactttcctacttggcagtacatctacgtattagtcatcgctattaccatggtgatgcggttttggcagtacatcaatgggcgtggatagcggtttgactcacggggatttccaagtctccaccccattgacgtcaatgggagtttgttttggcaccaaaatcaacgggactttccaaaatgtcgtaacaactccgccccattgacgcaaatgggcggtaggcgtgtacggtgggaggtctatataagcagagctggtttagtgaaccgtcagatcgttcactgccgtataggcagggcccagactgagcacgtgagttttagagctagaaatagcaagttaaaataaggctagtccgttatcaacttgaaaaagtgggaccgagtcggtcctctgccatcaaagcgtgctcagtctgttttgttttggctgggtttttccttgttcgcaccggacacctccagtgaccagacggcaaggtttttatcccagtgtatattggaaaaacatgttatacttttgacaatttaacgtgcctagagctcaaattaaactaataccataacgtaatgcaacttacaacataaataaaggtcaatgtttaatccataaaaaaaaaaaaaaaaaaaacacactgttttggctgggtttttccttgttcgcaccggacacctccagtgaccagacggcaaggtttttatcccagtgtatattggaaaaacatgttatacttttgacaatttaacgtgcctagagctcaaattaaactaataccataacgtaatgcaacttacaacataaataaaggtcaatgtttaatccataaaaaaaaaaaaaaaaaaatctctctgttttggctgggtttttccttgttcgcaccggacacctccagtgaccagacggcaaggtttttatcccagtgtatattggaaaaacatgttatacttttgacaatttaacgtgcctagagctcaaattaaactaataccataacgtaatgcaacttacaacataaataaaggtcaatgtttaatccataaaaaaaaaaaaaaaaaaa

SEQ ID NO: 195 - DNA, 807 bp, Artificial Sequence
  Synthetic
tagttattaatagtaatcaattacggggtcattagttcatagcccatatatggagttccgcgttacataacttacggtaaatggcccgcctggctgaccgcccaacgacccccgcccattgacgtcaataatgacgtatgttcccatagtaacgccaatagggactttccattgacgtcaatgggtggagtatttacggtaaactgcccacttggcagtacatcaagtgtatcatatgccaagtacgccccctattgacgtcaatgacggtaaatggcccgcctggcattatgcccagtacatgaccttatgggactttcctacttggcagtacatctacgtattagtcatcgctattaccatggtgatgcggttttggcagtacatcaatgggcgtggatagcggtttgactcacggggatttccaagtctccaccccattgacgtcaatgggagtttgttttggcaccaaaatcaacgggactttccaaaatgtcgtaacaactccgccccattgacgcaaatgggcggtaggcgtgtacggtgggaggtctatataagcagagctggtttagtgaaccgtcagatcgttcactgccgtataggcagggcccagactgagcacgtgagttttagagctagaaatagcaagttaaaataaggctagtccgttatcaacttgaaaaagtgggaccgagtcggtcctctgccatcaaagcgtgctcagtctgtttgtttcaaaagtagactgtacgctaagggtcatatctttttttgtttggtttgtgtcttggttggcgtcttaaa

SEQ ID NO: 196 - DNA, 743 bp, Artificial Sequence
  Synthetic
ctaaggaccagcttctttgggagagaacagacgcaggggcgggagggaaaaagggagaggcagacgtcacttccccttggcggctctggcagcagattggtcggttgagtggcagaaaggcagacggggactgggcaaggcactgtcggtgacatcacggacagggcgacttctatgtagatgaggcagcgcagaggctgctgcttcgccacttgctgcttcaccacgaaggagttcccgtgccctgggagcgggttcaggaccgctgatcggaagtgagaatcccagctgtgtgtcagggctggaaagggctcgggagtgcgcggggcaagtgaccgtgtgtgtaaagagtgaggcgtatgaggctgtgtcggggcagaggcccaagatctcagttcactgccgtataggcagggcccagactgagcacgtgagttttagagctagaaatagcaagttaaaataaggctagtccgttatcaacttgaaaaagtgggaccgagtcggtcctctgccatcaaagcgtgctcagtctgtttcagcaagttcagagaaatctgaacttgctggatttttggagcagggagatggaataggagcttgctccgtccactccacgcatcgacctggtattgcagtacctccaggaacggtgcacccactttctggagtttcaaaagtagactgtacgctaagggtcatatctttttttgtttggtttgtgtcttggttggcgtcttaaa

SEQ ID NO: 197 - DNA, 141 bp, Artificial Sequence
  Synthetic
ggcccagactgagcacgtgagttttagagctagctcatgaaaatgagctagcaagttaaaataaggctagtccgttatcaacttgaaaaagtgggaccgagtcggtcctctgccatcaaagcgtgctcagtctgttttttt

SEQ ID NO: 198 - DNA, 129 bp, Artificial Sequence
  Synthetic
ggcccagactgagcacgtgagtttgagagctagaaatagcaagtttaaataaggctagtccgttatcaacttgaaaaagtgggaccgagtcggtcctctgccatcaaagcgtgctcagtctgttttttt

SEQ ID NO: 199 - DNA, 197 bp, Artificial Sequence
  Synthetic
ggcccagactgagcacgtgagttttagagctagaaatagcaagttaaaataaggctagtccgttatcaacttgaaaaagtgggaccgagtcggtcctctgccatcaaagcgtgctcagtctgggccggcatggtcccagcctcctcgctggcgccggctgggcaacatgcttcggcatggcgaatgggacttttttt

SEQ ID NO: 200 - DNA, 171 bp, Artificial Sequence
  Synthetic
ggtgggagacgtcccaccggcccagactgagcacgtgagttttagagctagaaatagcaagttaaaataaggctagtccgttatcaacttgaaaaagtgggaccgagtcggtcctctgccatcaaagcttcgaccgtgctcagtctggtgggagacgtcccaccttttttt

SEQ ID NO: 201 - DNA, 180 bp, Artificial Sequence
  Synthetic
gagcagcatggcgtcgctgctcacggcccagactgagcacgtgagttttagagctagaaatagcaagttaaaataaggctagtccgttatcaacttgaaaaagtgggaccgagtcggtcctctgccatcaaagcttcgaccgtgctcagtctccatcagttgacaccctgaggttttttt

SEQ ID NO: 202 - DNA, 188 bp, Artificial Sequence
  Synthetic
gcagacctaagtggugacatatggtctgggcccagactgagcacgtgagttttagagctauacgtagcaagttaaaataaggctagtccgttatcaacttuacgaagtgggaccgagtcggtcctctgccatcaaagcttcgaccgtgctcagtctgcatgcgattagaaataatcgcatgttttttt

SEQ ID NO: 203 - DNA, 125 bp, Artificial Sequence
  Synthetic
tctgccatcaaagctgcgaccgtgctcagtctggtgggagacgtcccaccggccggcatggtcccagcctcctcgctggcgccggctgggcaacatgcttcggcatggcgaatgggacttttttt

SEQ ID NO: 204 - protein, 756 aa, Homo sapiens
MSFVAGVIRRLDETVVNRIAAGEVIQRPANAIKEMIENCLDAKSTSIQVIVKEGGLKLIQIQDNGTGIRKEDLDIVCERFTTSKLQSFEDLASISTYGFRGEALASISHVAHVTITTKTADGKCAYRASYSDGKLKAPPKPCAGNQGTQITVEDLFYNIATRRKALKNPSEEYGKILEVVGRYSVHNAGISFSVKKQGETVADVRTLPNASTVDNIRSIFGNAVSRELIEIGCEDKTLAFKMNGYISNANYSVKKCIFLLFINHRLVESTSLRKAIETVYAAYLPKNTHPFLYLSLEISPQNVDVNVHPTKHEVHFLHEESILERVQQHIESKLLGSNSSRMYFTQTLLPGLAGPSGEMVKSTTSLTSSSTSGSSDKVYAHQMVRTDSREQKLDAFLQPLSKPLSSQPQAIVTEDKTDISSGRARQQDEEMLELPAPAEVAAKNQSLEGDTTKGTSEMSEKRGPTSSNPRKRHREDSDVEMVEDDSRKEMTAACTPRRRIINLTSVLSLQEEINEQGHEVLREMLHNHSFVGCVNPQWALAQHQTKLYLLNTTKLSEELFYQILIYDFANFGVLRLSEPAPLFDLAMLALDSPESGWTEEDGPKEGLAEYIVEFLKKKAEMLADYFSLEIDEEGNLIGLPLLIDNYVPPLEGLPIFILRLATEVNWDEEKECFESLSKECAMFYSIRKQYISEESTLSGQQSEVPGSIPNSWKWTVEHIVYKALRSHILPPKHFTEDGNILQLANLPDLYKVFERC

SEQ ID NO: 205 - protein, 515 aa, Homo sapiens
MNGYISNANYSVKKCIFLLFINHRLVESTSLRKAIETVYAAYLPKNTHPFLYLSLEISPQNVDVNVHPTKHEVHFLHEESILERVQQHIESKLLGSNSSRMYFTQTLLPGLAGPSGEMVKSTTSLTSSSTSGSSDKVYAHQMVRTDSREQKLDAFLQPLSKPLSSQPQAIVTEDKTDISSGRARQQDEEMLELPAPAEVAAKNQSLEGDTTKGTSEMSEKRGPTSSNPRKRHREDSDVEMVEDDSRKEMTAACTPRRRIINLTSVLSLQEEINEQGHEVLREMLHNHSFVGCVNPQWALAQHQTKLYLLNTTKLSEELFYQILIYDFANFGVLRLSEPAPLFDLAMLALDSPESGWTEEDGPKEGLAEYIVEFLKKKAEMLADYFSLEIDEEGNLIGLPLLIDNYVPPLEGLPIFILRLATEVNWDEEKECFESLSKECAMFYSIRKQYISEESTLSGQQSEVPGSIPNSWKWTVEHIVYKALRSHILPPKHFTEDGNILQLANLPDLYKVFERC

SEQ ID NO: 206 - protein, 20 aa, Homo sapiens
  NON_CONS (9)..(10)
MSFVAGVIRRASISTYGFRG

SEQ ID NO: 207 - protein, 658 aa, Homo sapiens
MAFEALASISHVAHVTITTKTADGKCAYRASYSDGKLKAPPKPCAGNQGTQITVEDLFYNIATRRKALKNPSEEYGKILEVVGRYSVHNAGISFSVKKQGETVADVRTLPNASTVDNIRSIFGNAVSRELIEIGCEDKTLAFKMNGYISNANYSVKKCIFLLFINHRLVESTSLRKAIETVYAAYLPKNTHPFLYLSLEISPQNVDVNVHPTKHEVHFLHEESILERVQQHIESKLLGSNSSRMYFTQTLLPGLAGPSGEMVKSTTSLTSSSTSGSSDKVYAHQMVRTDSREQKLDAFLQPLSKPLSSQPQAIVTEDKTDISSGRARQQDEEMLELPAPAEVAAKNQSLEGDTTKGTSEMSEKRGPTSSNPRKRHREDSDVEMVEDDSRKEMTAACTPRRRIINLTSVLSLQEEINEQGHEVLREMLHNHSFVGCVNPQWALAQHQTKLYLLNTTKLSEELFYQILIYDFANFGVLRLSEPAPLFDLAMLALDSPESGWTEEDGPKEGLAEYIVEFLKKKAEMLADYFSLEIDEEGNLIGLPLLIDNYVPPLEGLPIFILRLATEVNWDEEKECFESLSKECAMFYSIRKQYISEESTLSGQQSEVPGSIPNSWKWTVEHIVYKALRSHILPPKHFTEDGNILQLANLPDLYKVFERC

SEQ ID NO: 208 - protein, 755 aa, Artificial Sequence
  Synthetic
MSFVAGVIRRLDETVVNRIAAGEVIQRPANAIKEMIENCLDAKSTSIQVIVKEGGLKLIQIQDNGTGIRKEDLDIVCERFTTSKLQSFEDLASISTYGFRGEALASISHVAHVTITTKTADGKCAYRASYSDGKLKAPPKPCAGNQGTQITVEDLFYNIATRRKALKNPSEEYGKILEVVGRYSVHNAGISFSVKKQGETVADVRTLPNASTVDNIRSIFGNAVSRELIEIGCEDKTLAFKMNGYISNANYSVKKCIFLLFINHRLVESTSLRKAIETVYAAYLPKNTHPFLYLSLEISPQNVDVNVHPTKHEVHFLHEESILERVQQHIESKLLGSNSSRMYFTQTLLPGLAGPSGEMVKSTTSLTSSSTSGSSDKVYAHQMVRTDSREQKLDAFLQPLSKPLSSQPQAIVTEDKTDISSGRARQQDEEMLELPAPAEVAAKNQSLEGDTTKGTSEMSEKRGPTSSNPRKRHREDSDVEMVEDDSRKEMTAACTPRRRIINLTSVLSLQEEINEQGHEVLREMLHNHSFVGCVNPQWALAQHQTKLYLLNTTKLSEELFYQILIYDFANFGVLRLSEPAPLFDLAMLALDSPESGWTEEDGPKEGLAEYIVEFLKKKAEMLADYFSLEIDEEGNLIGLPLLIDNYVPPLEGLPIFILRLATEVNWDEEKECFESLSKECAMFYSIRKQYISEESTLSGQQSEVPGSIPNSWKWTVEHIVYKALRSHILPPKHFTEDGNILQLANLPDLYKVFER

SEQ ID NO: 209 - protein, 753 aa, Artificial Sequence
  Synthetic
MSFVAGVIRRLDETVVNRIAAGEVIQRPANAIKEMIENCLDAKSTSIQVIVKEGGLKLIQIQDNGTGIRKEDLDIVCERFTTSKLQSFEDLASISTYGFRGEALASISHVAHVTITTKTADGKCAYRASYSDGKLKAPPKPCAGNQGTQITVEDLFYNIATRRKALKNPSEEYGKILEVVGRYSVHNAGISFSVKKQGETVADVRTLPNASTVDNIRSIFGNAVSRELIEIGCEDKTLAFKMNGYISNANYSVKKCIFLLFINHRLVESTSLRKAIETVYAAYLPKNTHPFLYLSLEISPQNVDVNVHPTKHEVHFLHEESILERVQQHIESKLLGSNSSRMYFTQTLLPGLAGPSGEMVKSTTSLTSSSTSGSSDKVYAHQMVRTDSREQKLDAFLQPLSKPLSSQPQAIVTEDKTDISSGRARQQDEEMLELPAPAEVAAKNQSLEGDTTKGTSEMSEKRGPTSSNPRKRHREDSDVEMVEDDSRKEMTAACTPRRRIINLTSVLSLQEEINEQGHEVLREMLHNHSFVGCVNPQWALAQHQTKLYLLNTTKLSEELFYQILIYDFANFGVLRLSEPAPLFDLAMLALDSPESGWTEEDGPKEGLAEYIVEFLKKKAEMLADYFSLEIDEEGNLIGLPLLIDNYVPPLEGLPIFILRLATEVNWDEEKECFESLSKECAMFYSIRKQYISEESTLSGQQSEVPGSIPNSWKWTVEHIVYKALRSHILPPKHFTEDGNILQLANLPDLYKVF

SEQ ID NO: 210 - protein, 753 aa, Artificial Sequence
  Synthetic
MSFVAGVIRRLDETVVNRIAAGEVIQRPANAIKAMIENCLDAKSTSIQVIVKEGGLKLIQIQDNGTGIRKEDLDIVCERFTTSKLQSFEDLASISTYGFRGEALASISHVAHVTITTKTADGKCAYRASYSDGKLKAPPKPCAGNQGTQITVEDLFYNIATRRKALKNPSEEYGKILEVVGRYSVHNAGISFSVKKQGETVADVRTLPNASTVDNIRSIFGNAVSRELIEIGCEDKTLAFKMNGYISNANYSVKKCIFLLFINHRLVESTSLRKAIETVYAAYLPKNTHPFLYLSLEISPQNVDVNVHPTKHEVHFLHEESILERVQQHIESKLLGSNSSRMYFTQTLLPGLAGPSGEMVKSTTSLTSSSTSGSSDKVYAHQMVRTDSREQKLDAFLQPLSKPLSSQPQAIVTEDKTDISSGRARQQDEEMLELPAPAEVAAKNQSLEGDTTKGTSEMSEKRGPTSSNPRKRHREDSDVEMVEDDSRKEMTAACTPRRRIINLTSVLSLQEEINEQGHEVLREMLHNHSFVGCVNPQWALAQHQTKLYLLNTTKLSEELFYQILIYDFANFGVLRLSEPAPLFDLAMLALDSPESGWTEEDGPKEGLAEYIVEFLKKKAEMLADYFSLEIDEEGNLIGLPLLIDNYVPPLEGLPIFILRLATEVNWDEEKECFESLSKECAMFYSIRKQYISEESTLSGQQSEVPGSIPNSWKWTVEHIVYKALRSHILPPKHFTEDGNILQLANLPDLYKVF

SEQ ID NO: 211 - protein, 335 aa, Artificial Sequence
  Synthetic
MSFVAGVIRRLDETVVNRIAAGEVIQRPANAIKEMIENCLDAKSTSIQVIVKEGGLKLIQIQDNGTGIRKEDLDIVCERFTTSKLQSFEDLASISTYGFRGEALASISHVAHVTITTKTADGKCAYRASYSDGKLKAPPKPCAGNQGTQITVEDLFYNIATRRKALKNPSEEYGKILEVVGRYSVHNAGISFSVKKQGETVADVRTLPNASTVDNIRSIFGNAVSRELIEIGCEDKTLAFKMNGYISNANYSVKKCIFLLFINHRLVESTSLRKAIETVYAAYLPKNTHPFLYLSLEISPQNVDVNVHPTKHEVHFLHEESILERVQQHIESKLL

SEQ ID NO: 212 - protein, 335 aa, Artificial Sequence
  Synthetic
MSFVAGVIRRLDETVVNRIAAGEVIQRPANAIKAMIENCLDAKSTSIQVIVKEGGLKLIQIQDNGTGIRKEDLDIVCERFTTSKLQSFEDLASISTYGFRGEALASISHVAHVTITTKTADGKCAYRASYSDGKLKAPPKPCAGNQGTQITVEDLFYNIATRRKALKNPSEEYGKILEVVGRYSVHNAGISFSVKKQGETVADVRTLPNASTVDNIRSIFGNAVSRELIEIGCEDKTLAFKMNGYISNANYSVKKCIFLLFINHRLVESTSLRKAIETVYAAYLPKNTHPFLYLSLEISPQNVDVNVHPTKHEVHFLHEESILERVQQHIESKLL

SEQ ID NO: 213 - protein, 342 aa, Artificial Sequence
  Synthetic
MSFVAGVIRRLDETVVNRIAAGEVIQRPANAIKEMIENCLDAKSTSIQVIVKEGGLKLIQIQDNGTGIRKEDLDIVCERFTTSKLQSFEDLASISTYGFRGEALASISHVAHVTITTKTADGKCAYRASYSDGKLKAPPKPCAGNQGTQITVEDLFYNIATRRKALKNPSEEYGKILEVVGRYSVHNAGISFSVKKQGETVADVRTLPNASTVDNIRSIFGNAVSRELIEIGCEDKTLAFKMNGYISNANYSVKKCIFLLFINHRLVESTSLRKAIETVYAAYLPKNTHPFLYLSLEISPQNVDVNVHPTKHEVHFLHEESILERVQQHIESKLLPKKKRKV

SEQ ID NO: 214 - protein, 335 aa, Artificial Sequence; identical to SEQ ID NO: 211
  Synthetic

SEQ ID NO: 215 - protein, 256 aa, Artificial Sequence
  Synthetic
INLTSVLSLQEEINEQGHEVLREMLHNHSFVGCVNPQWALAQHQTKLYLLNTTKLSEELFYQILIYDFANFGVLRLSEPAPLFDLAMLALDSPESGWTEEDGPKEGLAEYIVEFLKKKAEMLADYFSLEIDEEGNLIGLPLLIDNYVPPLEGLPIFILRLATEVNWDEEKECFESLSKECAMFYSIRKQYISEESTLSGQQSEVPGSIPNSWKWTVEHIVYKALRSHILPPKHFTEDGNILQLANLPDLYKVFERC

SEQ ID NO: 216 - protein, 253 aa, Artificial Sequence
  Synthetic
INLTSVLSLQEEINEQGHEVLREMLHNHSFVGCVNPQWALAQHQTKLYLLNTTKLSEELFYQILIYDFANFGVLRLSEPAPLFDLAMLALDSPESGWTEEDGPKEGLAEYIVEFLKKKAEMLADYFSLEIDEEGNLIGLPLLIDNYVPPLEGLPIFILRLATEVNWDEEKECFESLSKECAMFYSIRKQYISEESTLSGQQSEVPGSIPNSWKWTVEHIVYKALRSHILPPKHFTEDGNILQLANLPDLYKVF

SEQ ID NO: 217 - protein, 296 aa, Artificial Sequence
  Synthetic
KRGPTSSNPRKRHREDSDVEMVEDDSRKEMTAACTPRRRIINLTSVLSLQEEINEQGHEVLREMLHNHSFVGCVNPQWALAQHQTKLYLLNTTKLSEELFYQILIYDFANFGVLRLSEPAPLFDLAMLALDSPESGWTEEDGPKEGLAEYIVEFLKKKAEMLADYFSLEIDEEGNLIGLPLLIDNYVPPLEGLPIFILRLATEVNWDEEKECFESLSKECAMFYSIRKQYISEESTLSGQQSEVPGSIPNSWKWTVEHIVYKALRSHILPPKHFTEDGNILQLANLPDLYKVFERC

SEQ ID NO: 218 - protein, 293 aa, Artificial Sequence
  Synthetic
KRGPTSSNPRKRHREDSDVEMVEDDSRKEMTAACTPRRRIINLTSVLSLQEEINEQGHEVLREMLHNHSFVGCVNPQWALAQHQTKLYLLNTTKLSEELFYQILIYDFANFGVLRLSEPAPLFDLAMLALDSPESGWTEEDGPKEGLAEYIVEFLKKKAEMLADYFSLEIDEEGNLIGLPLLIDNYVPPLEGLPIFILRLATEVNWDEEKECFESLSKECAMFYSIRKQYISEESTLSGQQSEVPGSIPNSWKWTVEHIVYKALRSHILPPKHFTEDGNILQLANLPDLYKVF

SEQ ID NO: 219 - protein, 760 aa, Mus musculus
MAFVAGVIRRLDETVVNRIAAGEVIQRPANAIKEMIENCLDAKSTNIQVVVKEGGLKLIQIQDNGTGIRKEDLDIVCERFTTSKLQTFEDLASISTYGFRGEALASISHVAHVTITTKTADGKCAYRASYSDGKLQAPPKPCAGNQGTLITVEDLFYNIITRRKALKNPSEEYGKILEVVGRYSIHNSGISFSVKKQGETVSDVRTLPNATTVDNIRSIFGNAVSRELIEVGCEDKTLAFKMNGYISNANYSVKKCIFLLFINHRLVESAALRKAIETVYAAYLPKNTHPFLYLSLEISPQNVDVNVHPTKHEVHFLHEESILQRVQQHIESKLLGSNSSRMYFTQTLLPGLAGPSGEAARPTTGVASSSTSGSGDKVYAYQMVRTDSREQKLDAFLQPVSSLGPSQPQDPAPVRGARTEGSPERATREDEEMLALPAPAEAAAESENLERESLMETSDAAQKAAPTSSPGSSRKRHREDSDVEMVENASGKEMTAACYPRRRIINLTSVLSLQEEISERCHETLREMLRNHSFVGCVNPQWALAQHQTKLYLLNTTKLSEELFYQILIYDFANFGVLRLSEPAPLFDLAMLALDSPESGWTEDDGPKEGLAEYIVEFLKKKAEMLADYFSVEIDEEGNLIGLPLLIDSYVPPLEGLPIFILRLATEVNWDEEKECFESLSKECAMFYSIRKQYILEESTLSGQQSDMPGSTSKPWKWTVEHIIYKAFRSHLLPPKHFTEDGNVLQLANLPDLYKVFERC

SEQ ID NO: 220 - protein, 757 aa, Rattus norvegicus
MSFVAGVIRRLDETVVNRIAAGEVIQRPANAIKEMTENCLDAKSTNIQVIVREGGLKLIQIQDNGTGIRKEDLDIVCERFTTSKLQTFEDLAMISTYGFRGEALASISHVAHVTITTKTADGKCAYRASYSDGKLQAPPKPCAGNQGTLITVEDLFYNIITRKKALKNPSEEYGKILEVVGRYSIHNSGISFSVKKQGETVSDVRTLPNATTVDNIRSIFGNAVSRELIEVGCEDKTLAFKMNGYISNANYSVKKCIFLLFINHRLVESAALKKAIEAVYAAYLPKNTHPFLYLILEISPQNVDVNVHPTKHEVHFLHEESILERVQQHIESKLLGSNSSRMYFTQTLLPGLAGPSGEAVKSTTGIASSSTSGSGDKVHAYQMVRTDSRDQKLDAFMQPVSRRLPSQPQDPVPGNRTEGSPEKAMQKDQEISELPAPMEAAADSASLERESVIGASEVVAPQRHPSSPGSSRKRHPEDSDVEMMENDSRKEMTAACYPRRRIINLTSVLSLQEEINDRGHETLREMLRNHTFVGCVNPQWALAQHQTKLYLLNTTKLSEELFYQILIYDFANFGVLRLPEPAPLFDFAMLALDSPESGWTEEDGPKEGLAEYIVEFLKKKAKMLADYFSVEIDEEGNLIGLPLLIDSYVPPLEGLPIFILRLATEVNWDEEECFESLSKECAVFYSIRKQYILEESALSGQQSDMPGSPSKPWKWTVEHIIYKAFRSHLLPPKHFTEDGNVLQLANLPDLCKVFERC

SEQ ID NO: 221 - protein, 758 aa, Bos taurus
MSLVAGVIRRLDETVVNRIAAGEVIQRPANAIKEMIENCLDAKSTSIQVVVKEGGLKLIQIQDNGTGIRKEDLEIVCERFTTSKLQSFEDLAHISTYGFRGEALASISHVAHVTITTKTADGKCAYRAHYSDGKLKAPPKPCAGNQGTQITVEDLFYNISTRRKALKNPSEEYGKILEVVGRYAVHNSGIGFSVKKQGETVADVRTLPNATTVDNIRSIFGNAVSRELIEVECEDKTLAFKMNGYISNANYSVKKCIFLLFINHRLVESASLRKAIETVYAAYLPKSTHPFLYLSLEISPQNVDVNVHPTKHEVHFLHEDSILERLQQHIESRLLGSNASRTYFTQTLLPGLPGPSGEAVKSTASVTSSSTAGSGDRVYAHQMVRTDCREQKLDAFLQPVSKALSSQPQAVVPEHRTDASSSGTRQQDEEMLELPAPAAVAAKSQALEDDATMRAADLAEKRGPSSSPENPRKRPREDSDVEMVEDASRKEMTAACTPRRRIINLTSVLSLQEEINERGHETLREMLHNHSFVGCVNPQWALAQHQTKLYLLNTTRLSEELFYQILVYDFANFGVLRLSEPAPLFDLAMLALDSPESGWTEEDGPKEGLAEYIVEFLKKKAEMLADYFSLEIDEEGNLVGLPLLIDNYVPPLEGLPIFILRLATEVNWDEEKECFESLSKECAMFYSIRKQYVSAESTLSGQQSEVPGSTANPWKWTVEHVIYKAFRSHLLPPKHFTEDGNILQLANLPDLYKVFERC

SEQ ID NO: 222 - protein, 756 aa, Artificial Sequence
  Synthetic
MSFVAGVIRRLDETVVNRIAAGEVIQRPANAIKAMIENCLDAKSTSIQVIVKEGGLKLIQIQDNGTGIRKEDLDIVCERFTTSKLQSFEDLASISTYGFRGEALASISHVAHVTITTKTADGKCAYRASYSDGKLKAPPKPCAGNQGTQITVEDLFYNIATRRKALKNPSEEYGKILEVVGRYSVHNAGISFSVKKQGETVADVRTLPNASTVDNIRSIFGNAVSRELIEIGCEDKTLAFKMNGYISNANYSVKKCIFLLFINHRLVESTSLRKAIETVYAAYLPKNTHPFLYLSLEISPQNVDVNVHPTKHEVHFLHEESILERVQQHIESKLLGSNSSRMYFTQTLLPGLAGPSGEMVKSTTSLTSSSTSGSSDKVYAHQMVRTDSREQKLDAFLQPLSKPLSSQPQAIVTEDKTDISSGRARQQDEEMLELPAPAEVAAKNQSLEGDTTKGTSEMSEKRGPTSSNPRKRHREDSDVEMVEDDSRKEMTAACTPRRRIINLTSVLSLQEEINEQGHEVLREMLHNHSFVGCVNPQWALAQHQTKLYLLNTTKLSEELFYQILIYDFANFGVLRLSEPAPLFDLAMLALDSPESGWTEEDGPKEGLAEYIVEFLKKKAEMLADYFSLEIDEEGNLIGLPLLIDNYVPPLEGLPIFILRLATEVNWDEEKECFESLSKECAMFYSIRKQYISEESTLSGQQSEVPGSIPNSWKWTVEHIVYKALRSHILPPKHFTEDGNILQLANLPDLYKVFERC

SEQ ID NO: 223 - protein, 260 aa, Artificial Sequence
  Synthetic
PKKKRKVINLTSVLSLQEEINEQGHEVLREMLHNHSFVGCVNPQWALAQHQTKLYLLNTTKLSEELFYQILIYDFANFGVLRLSEPAPLFDLAMLALDSPESGWTEEDGPKEGLAEYIVEFLKKKAEMLADYFSLEIDEEGNLIGLPLLIDNYVPPLEGLPIFILRLATEVNWDEEKECFESLSKECAMFYSIRKQYISEESTLSGQQSEVPGSIPNSWKWTVEHIVYKALRSHILPPKHFTEDGNILQLANLPDLYKVF

SEQ ID NO: 224 - protein, 300 aa, Artificial Sequence
  Synthetic
PKKKRKVKRGPTSSNPRKRHREDSDVEMVEDDSRKEMTAACTPRRRIINLTSVLSLQEEINEQGHEVLREMLHNHSFVGCVNPQWALAQHQTKLYLLNTTKLSEELFYQILIYDFANFGVLRLSEPAPLFDLAMLALDSPESGWTEEDGPKEGLAEYIVEFLKKKAEMLADYFSLEIDEEGNLIGLPLLIDNYVPPLEGLPIFILRLATEVNWDEEKECFESLSKECAMFYSIRKQYISEESTLSGQQSEVPGSIPNSWKWTVEHIVYKALRSHILPPKHFTEDGNILQLANLPDLYKVF

SEQ ID NO: 225 - protein, 862 aa, Homo sapiens
MERAESSSTEPAKAIKPIDRKSVHQICSGQVVLSLSTAVKELVENSLDAGATNIDLKLKDYGVDLIEVSDNGCGVEEENFEGLTLKHHTSKIQEFADLTQVETFGFRGEALSSLCALSDVTISTCHASAKVGTRLMFDHNGKIIQKTPYPRPRGTTVSVQQLFSTLPVRHKEFQRNIKKEYAKMVQVLHAYCIISAGIRVSCTNQLGQGKRQPVVCTGGSPSIKENIGSVFGQKQLQSLIPFVQLPPSDSVCEEYGLSCSDALHNLFYISGFISQCTHGVGRSSTDRQFFFINRRPCDPAKVCRLVNEVYHMYNRHQYPFVVLNISVDSECVDINVTPDKRQILLQEEKLLLAVLKTSLIGMFDSDVNKLNVSQQPLLDVEGNLIKMHAADLEKPMVEKQDQSPSLRTGEEKKDVSISRLREAFSLRHTTENKPHSPKTPEPRRSPLGQKRGMLSSSTSGAISDKGVLRPQKEAVSSSHGPSDPTDRAEVEKDSGHGSTSVDSEGFSIPDTGSHCSSEYAASSPGDRGSQEHVDSQEKAPKTDDSFSDVDCHSNQEDTGCKFRVLPQPTNLATPNTKRFKKEEILSSSDICQKLVNTQDMSASQVDVAVKINKKVVPLDFSMSSLAKRIKQLHHEAQQSEGEQNYRKFRAKICPGENQAAEDELRKEISKTMFAEMEIIGQFNLGFIITKLNEDIFIVDQHATDEKYNFEMLQQHTVLQGQRLIAPQTLNLTAVNEAVLIENLEIFRKNGFDFVIDENAPVTERAKLISLPTSKNWTFGPQDVDELIFMLSDSPGVMCRPSRVKQMFASRACRKSVMIGTALNTSEMKKLITHMGEMDHPWNCPHGRPTMRHIANLGVISQN

SEQ ID NO: 226 - protein, 932 aa, Homo sapiens
MKQLPAATVRLLSSSQIITSVVSVVKELIENSLDAGATSVDVKLENYGFDKIEVRDNGEGIKAVDAPVMAMKYYTSKINSHEDLENLTTYGFRGEALGSICCIAEVLITTRTAADNFSTQYVLDGSGHILSQKPSHLGQGTTVTALRLFKNLPVRKQFYSTAKKCKDEIKKIQDLLMSFGILKPDLRIVFVHNKAVIWQKSRVSDHKMALMSVLGTAVMNNMESFQYHSEESQIYLSGFLPKCDADHSFTSLSTPERSFIFINSRPVHQKDILKLIRHHYNLKCLKESTRLYPVFFLKIDVPTADVDVNLTPDKSQVLLQNKESVLIALENLMTTCYGPLPSTNSYENNKTDVSAADIVLSKTAETDVLFNKVESSGKNYSNVDTSVIPFQNDMHNDESGKNTDDCLNHQISIGDFGYGHCSSEISNIDKNTKNAFQDISMSNVSWENSQTEYSKTCFISSVKHTQSENGNKDHIDESGENEEEAGLENSSEISADEWSRGNILKNSVGENIEPVKILVPEKSLPCKVSNNNYPIPEQMNLNEDSCNKKSNVIDNKSGKVTAYDLLSNRVIKKPMSASALFVQDHRPQFLIENPKTSLEDATLQIEELWKTLSEEEKLKYEEKATKDLERYNSQMKRAIEQESQMSLKDGRKKIKPTSAWNLAQKHKLKTSLSNQPKLDELLQSQIEKRRSQNIKMVQIPFSMKNLKINFKKQNKVDLEEKDEPCLIHNLRFPDAWLMTSKTEVMLLNPYRVEEALLFKRLLENHKLPAEPLEKPIMLTESLFNGSHYLDVLYKMTADDQRYSGSTYLSDPRLTANGFKIKLIPGVSITENYLEIEGMANCLPFYGVADLKEILNAILNRNAKEVYECRPRKVISYLEGEAVRLSRQLPMYLSKEDIQDIIYRMKHQFGNEIKECVHGRPFFHHLTYLPETT

SEQ ID NO: 227 - protein, 1453 aa, Homo sapiens
MIKCLSVEVQAKLRSGLAISSLGQCVEELALNSIDAEAKCVAVRVNMETFQVQVIDNGFGMGSDDVEKVGNRYFTSKCHSVQDLENPRFYGFRGEALANIADMASAVEISSKKNRTMKTFVKLFQSGKALKACEADVTRASAGTTVTVYNLFYQLPVRRKCMDPRLEFEKVRQRIEALSLMHPSISFSLRNDVSGSMVLQLPKTKDVCSRFCQIYGLGKSQKLREISFKYKEFELSGYISSEAHYNKNMQFLFVNKRLVLRTKLHKLIDFLLRKESIICKPKNGPTSRQMNSSLRHRSTPELYGIYVINVQCQFCEYDVCMEPAKTLIEFQNWDTLLFCIQEGVKMFLKQEKLFVELSGEDIKEFSEDNGFSLFDATLQKRVTSDERSNFQEACNNILDSYEMFNLQSKAVKRKTTAENVNTQSSRDSEATRKNTNDAFLYIYESGGPGHSKMTEPSLQNKDSSCSESKMLEQETIVASEAGENEKHKKSFLEHSSLENPCGTSLEMFLSPFQTPCHFEESGQDLEIWKESTTVNGMAANILKNNRIQNQPKRFKDATEVGCQPLPFATTLWGVHSAQTEKEKKKESSNCGRRNVFSYGRVKLCSTGFITHVVQNEKTKSTETEHSFKNYVRPGPTRAQETFGNRTRHSVETPDIKDLASTLSKESGQLPNKKNCRTNISYGLENEPTATYTMFSAFQEGSKKSQTDCILSDTSPSFPWYRHVSNDSRKTDKLIGFSKPIVRKKLSLSSQLGSLEKFKRQYGKVENPLDTEVEESNGVTTNLSLQVEPDILLKDKNRLENSDVCKITTMEHSDSDSSCQPASHILNSEKFPFSKDEDCLEQQMPSLRESPMTLKELSLFNRKPLDLEKSSESLASKLSRLKGSERETQTMGMMSRFNELPNSDSSRKDSKLCSVLTQDFCMLFNNKHEKTENGVIPTSDSATQDNSFNKNSKTHSNSNTTENCVISETPLVLPYNNSKVTGKDSDVLIRASEQQIGSLDSPSGMLMNPVEDATGDQNGICFQSEESKARACSETEESNTCCSDWQRHFDVALGRMVYVNKMTGLSTFIAPTEDIQAACTKDLTTVAVDVVLENGSQYRCQPFRSDLVLPFLPRARAERTVMRQDNRDTVDDTVSSESLQSLFSEWDNPVFARYPEVAVDVSSGQAESLAVKIHNILYPYRFTKGMIHSMQVLQQVDNKFIACLMSTKTEENGEAGGNLLVLVDQHAAHERIRLEQLIIDSYEKQQAQGSGRKKLLSSTLIPPLEITVTEEQRRLLWCYHKNLEDLGLEFVFPDTSDSLVLVGKVPLCFVEREANELRRGRSTVTKSIVEEFIREQLELLQTTGGIQGTLPLTVQKVLASQACHGAIKFNDGLSLQESCRLIEALSSCQLPFQCAHGRPSMLPLADIDHLEQEKQIKPNLTKLRKMAQAWRLFGKAECDTRQSLQQSMPPCEPP

SEQ ID NO: 228 - protein, 934 aa, Homo sapiens [sequence omitted]

SEQ ID NO: 229 - protein, 1360 aa, Homo sapiens
MSRQSTLYSFFPKSPALSDANKASARASREGGRAAAAPGASPSPGGDAAWSEAGPGPRPLARSASPPKAKNLNGGLRRSVAPAAPTSCDFSPGDLVWAKMEGYPWWPCLVYNHPFDGTFIREKGKSVRVHVQFFDDSPTRGWVSKRLLKPYTGSKSKEAQKGGHFYSAKPEILRAMQRADEALNKDKIKRLELAVCDEPSEPEEEEEMEVGTTYVTDKSEEDNEIESEEEVQPKTQGSRRSSRQIKKRRVISDSESDIGGSDVEFKPDTKEEGSSDEISSGVGDSESEGLNSPVKVARKRKRMVTGNGSLKRKSSRKETPSATKQATSISSETKNTLRAFSAPQNSESQAHVSGGGDDSSRPTVWYHETLEWLKEEKRRDEHRRRPDHPDFDASTLYVPEDFLNSCTPGMRKWWQIKSQNFDLVICYKVGKFYELYHMDALIGVSELGLVFMKGNWAHSGFPEIAFGRYSDSLVQKGYKVARVEQTETPEMMEARCRKMAHISKYDRVVRREICRIITKGTQTYSVLEGDPSENYSKYLLSLKEKEEDSSGHTRAYGVCFVDTSLGKFFIGQFSDDRHCSRFRTLVAHYPPVQVLFEKGNLSKETKTILKSSLSCSLQEGLIPGSQFWDASKTLRTLLEEEYFREKLSDGIGVMLPQVLKGMTSESDSIGLTPGEKSELALSALGGCVFYLKKCLIDQELLSMANFEEYIPLDSDTVSTTRSGAIFTKAYQRMVLDAVTLNNLEIFLNGTNGSTEGTLLERVDTCHTPFGKRLLKQWLCAPLCNHYAINDRLDAIEDLMVVPDKISEVVELLKKLPDLERLLSKIHNVGSPLKSQNHPDSRAIMYEETTYSKKKIIDFLSALEGFKVMCKIIGIMEEVADGFKSKILKQVISLQTKNPEGRFPDLTVELNRWDTAFDHEKARKTGLITPKAGFDSDYDQALADIRENEQSLLEYLEKQRNRIGCRTIVYWGIGRNRYQLEIPENFTTRNLPEEYELKSTKKGCKRYWTKTIEKKLANLINAEERRDVSLKDCMRRLFYNFDKNYKDWQSAVECIAVLDVLLCLANYSRGGDGPMCRPVILLPEDTPPFLELKGSRHPCITKTFFGDDFIPNDILIGCEEEEQENGKAYCVLVTGPNMGGKSTLMRQAGLLAVMAQMGCYVPAEVCRLTPIDRVFTRLGASDRIMSGESTFFVELSETASILMHATAHSLVLVDELGRGTATFDGTAIANAVVKELAETIKCRTLFSTHYHSLVEDYSQNVAVRLGHMACMVENECEDPSQETITFLYKFIKGACPKSYGFNAARLANLPEEVIQKGHRKAREFEKMNQSLRLFREVCLASERSTVDAEAVHKLLTLIKEL

SEQ ID NO: 230 - protein, 261 aa, Homo sapiens
MFEARLVQGSILKKVLEALKDLINEACWDISSSGVNLQSMDSSHVSLVQLTLRSEGFDTYRCDRNLAMGVNLTSMSKILKCAGNEDIITLRAEDNADTLALVFEAPNQEKVSDYEMKLMDLDVEQLGIPEQEYSCVVKMPSGEFARICRDLSHIGDAVVISCAKDGVKFSASGELGNGNIKLSQTSNVDKEEEAVTIEMNEPVQLTFALRYLNFFTKATPLSSTVTLSMSADVPLVVEYKIADMGHLKYYLAPKIEDEEGS

SEQ ID NO: 231 - protein, 1148 aa, Homo sapiens
MDIRKFFGVIPSGKKLVSETVKKNEKTKSDEETLKAKKGIKEIKVNSSRKEDDFKQKQPSKKKRIIYDSDSESEETLQVKNAKKPPEKLPVSSKPGKISRQDPVTYISETDEEDDFMCKKAASKSKENGRSTNSHLGTSNMKKNEENTKTKNKPLSPIKLTPTSVLDYFGTGSVQRSNKKMVASKRKELSQNTDESGLNDEAIAKQLQLDEDAELERQLHEDEEFARTLAMLDEEPKTKKARKDTEAGETFSSVQANLSKAEKHKYPHKVKTAQVSDERKSYSPRKQSKYESSKESQQHSKSSADKIGEVSSPKASSKLAIMKRKEESSYKEIEPVASKRKENAIKLKGETKTPKKTKSSPAKKESVSPEDSEKKRTNYQAYRSYLNREGPKALGSKEIPKGAENCLEGLIFVITGVLESIERDEAKSLIERYGGKVTGNVSKKTNYLVMGRDSGQSKSDKAAALGTKIIDEDGLLNLIRTMPGKKSKYEIAVETEMKKESKLERTPQKNVQGKRKISPSKKESESKKSRPTSKRDSLAKTIKKETDVFWKSLDFKEQVAEETSGDSKARNLADDSSENKVENLLWVDKYKPTSLKTIIGQQGDQSCANKLLRWLRNWQKSSSEDKKHAAKFGKFSGKDDGSSFKAALLSGPPGVGKTTTASLVCQELGYSYVELNASDTRSKSSLKAIVAESLNNTSIKGFYSNGAASSVSTKHALIMDEVDGMAGNEDRGGIQELIGLIKHTKIPIICMCNDRNHPKIRSLVHYCFDLRFQRPRVEQIKGAMMSIAFKEGLKIPPPAMNEIILGANQDIRQVLHNLSMWCARSKALTYDQAKADSHRAKKDIKMGPFDVARKVFAAGEETAHMSLVDKSDLFFHDYSIAPLFVQENYIHVKPVAAGGDMKKHLMLLSRAADSICDGDLVDSQIRSKQNWSLLPAQAIYASVLPGELMRGYMTQFPTFPSWLGKHSSTGKHDRIVQDLALHMSLRTYSSKRTVNMDYLSLLRDALVQPLTSQGVDGVQDVVALMDTYYLMKEDFENIMEISSWGGKPSPFSKLDPKVKAAFTRAYNKEAHLTPYSLQAIKASRHSTSPSLDSEYNEELNEDDSQSDEKDQDAIETDAMIKKKTKSSKPSKPEKDKEPRKGKGKSSKK

SEQ ID NO: 232 - protein, 1107 aa, Homo sapiens
MDGKRRPGPGPGVPPKRARGGLWDDDDAPRPSQFEEDLALMEEMEAEHRLQEQEEEELQSVLEGVADGQVPPSAIDPRWLRPTPPALDPQTEPLIFQQLEIDHYVGPAQPVPGGPPPSRGSVPVLRAFGVTDEGFSVCCHIHGFAPYFYTPAPPGFGPEHMGDLQRELNLAISRDSRGGRELTGPAVLAVELCSRESMFGYHGHGPSPFLRITVALPRLVAPARRLLEQGIRVAGLGTPSFAPYEANVDFEIRFMVDTDIVGCNWLELPAGKYALRLKEKATQCQLEADVLWSDVVSHPPEGPWQRIAPLRVLSFDIECAGRKGIFPEPERDPVIQICSLGLRWGEPEPFLRLALTLRPCAPILGAKVQSYEKEEDLLQAWSTFIRIMDPDVITGYNIQNFDLPYLISRAQTLKVQTFPFLGRVAGLCSNIRDSSFQSKQTGRRDTKVVSMVGRVQMDMLQVLLREYKLRSYTLNAVSFHFLGEQKEDVQHSIITDLQNGNDQTRRRLAVYCLKDAYLPLRLLERLMVLVNAVEMARVTGVPLSYLLSRGQQVKVVSQLLRQAMHEGLLMPVVKSEGGEDYTGATVIEPLKGYYDVPIATLDFSSLYPSIMMAHNLCYTTLLRPGTAQKLGLTEDQFIRTPTGDEFVKTSVRKGLLPQILENLLSARKRAKAELAKETDPLRRQVLDGRQLALKVSANSVYGFTGAQVGKLPCLEISQSVTGFGRQMIEKTKQLVESKYTVENGYSTSAKVVYGDTDSVMCRFGVSSVAEAMALGREAADWVSGHFPSPIRLEFEKVYFPYLLISKKRYAGLLFSSRPDAHDRMDCKGLEAVRRDNCPLVANLVTASLRRLLIDRDPEGAVAHAQDVISDLLCNRIDISQLVITKELTRAASDYAGKQAHVELAERMRKRDPGSAPSLGDRVPYVIISAAKGVAAYMKSEDPLFVLEHSLPIDTQYYLEQQLAKPLLRIFEPILGEGRAEAVLLRGDHTRCKTVLTGKVGGLLAFAKRRNCCIGCRTVLSHQGAVCEFCQPRESELYQKEVSHLNALEERFSRLWTQCQRCQGSLHEDVICTSRDCPIFYMRKKVRKDLEDQEQLLRRFGPPGPEAW

SEQ ID NO: 233 - protein, 18 aa, Artificial Sequence
  Synthetic
EGRGSLLTCGDVEENPGP

SEQ ID NO: 234 - protein, 19 aa, Artificial Sequence
  Synthetic
ATNFSLLKQAGDVEENPGP

SEQ ID NO: 235 - protein, 20 aa, Artificial Sequence
  Synthetic
QCTNYALLKLAGDVESNPGP

SEQ ID NO: 236 - protein, 22 aa, Artificial Sequence
  Synthetic
VKQTLNFDLLKLAGDVESNPGP

SEQ ID NO: 237 - RNA, 197 nt, Artificial Sequence
  Synthetic
gagggacuccuagaggacugguuuuagagcuagaaauagcaaguuaaaauaaggcuaguccguuaucaacuugaaaaaguggcaccgagucggugcauauugacacaauuccccaauccucuaggagucaaaaacacgucagggucaggagcccccccccugcacccaggaaaacccucaaagucggggggcaaccc

SEQ ID NO: 238 - DNA, 100 bp, Artificial Sequence
  Synthetic
gcagaaccgccacucauucaguuuuagagcuagaaauagcaaguuaaaauaaggcuaguccguuaucaacuugaaaaaguggcaccgagucggugctttt

SEQ ID NO: 239 - DNA, 100 bp, Artificial Sequence
  Synthetic
acacaauuccccaauccucuguuuuagagcuagaaauagcaaguuaaaauaaggcuaguccguuaucaacuugaaaaaguggcaccgagucggugctttt

SEQ ID NO: 240 - RNA, 120 nt, Artificial Sequence
  Synthetic
gcagugguggggggccuuggguuuuagagcuagaaauagcaaguuaaaauaaggcuaguccguuaucaacuugaaaaaguggcaccgagucggugcauguagacgccaaggccccccacc

SEQ ID NO: 241 - DNA, 100 bp, Artificial Sequence
  Synthetic
gcauguuuucacgauaguaaguuuuagagcuagaaauagcaaguuaaaauaaggcuaguccguuaucaacuugaaaaaguggcaccgagucggugctttt

SEQ ID NO: 242 - RNA, 126 nt, Artificial Sequence
  Synthetic
ggaaucccuucugcagcaccguuuuagagcuagaaauagcaaguuaaaauaaggcuaguccguuaucaacuugaaaaaguggcaccgagucggugcggaaaagcgaucaaggugcugcagaaggga

SEQ ID NO: 243 - DNA, 100 bp, Artificial Sequence
  Synthetic
ggggucccaggugcugacguguuuuagagcuagaaauagcaaguuaaaauaaggcuaguccguuaucaacuugaaaaaguggcaccgagucggugctttt

SEQ ID NO: 244 - RNA, 126 nt, Artificial Sequence
  Synthetic
gucaucuuagucauuaccugguuuuagagcuagaaauagcaaguuaaaauaaggcuaguccguuaucaacuugaaaaaguggcaccgagucggugcaacgaacaccucagaguaaugacuaagaug

SEQ ID NO: 245 - DNA, 100 bp, Artificial Sequence
  Synthetic
ucaaccauuaagcaaaacauguuuuagagcuagaaauagcaaguuaaaauaaggcuaguccguuaucaacuugaaaaaguggcaccgagucggugctttt

SEQ ID NO: 246 - RNA, 129 nt, Artificial Sequence
  Synthetic
caaccacccacaagucauugguuuuagagcuagaaauagcaaguuaaaauaaggcuaguccguuaucaacuugaaaaaguggcaccgagucggugcugaccgcuucuacgccaaugacuuguggguggu

SEQ ID NO: 247 - DNA, 100 bp, Artificial Sequence
  Synthetic
caucuuugccaacgucagugguuuuagagcuagaaauagcaaguuaaaauaaggcuaguccguuaucaacuugaaaaaguggcaccgagucggugctttt

SEQ ID NO: 248 - RNA, 126 nt, Artificial Sequence
  Synthetic
ccaggugucuuucaaaguagguuuuagagcuagaaauagcaaguuaaaauaaggcuaguccguuaucaacuugaaaaaguggcaccgagucggugcucccaagccuccgacuucuuugaaagacac

SEQ ID NO: 249 - DNA, 100 bp, Artificial Sequence
  Synthetic
cucccuccaaguuguccacgguuuuagagcuagaaauagcaaguuaaaauaaggcuaguccguuaucaacuugaaaaaguggcaccgagucggugctttt

SEQ ID NO: 250 - DNA, 61 bp, Artificial Sequence
  Synthetic
acactctttccctacacgacgctcttccgatctaaattggacagcaagaaagcgagcttag

SEQ ID NO: 251 - DNA, 51 bp, Artificial Sequence
  Synthetic
tggagttcagacgtgtgctcttccgatctctttgccacactgagtgagctg

SEQ ID NO: 252 - DNA, 64 bp, Artificial Sequence
  Synthetic
  misc_feature (34)..(37): n is a, c, g, or t
acactctttccctacacgacgctcttccgatctnnnngcctttagtgatggcctggctcacctg

SEQ ID NO: 253 - DNA, 49 bp, Artificial Sequence
  Synthetic
tggagttcagacgtgtgctcttccgatcttaggcggccgctgcacgtag

SEQ ID NO: 254 - DNA, 57 bp, Artificial Sequence
  Synthetic
acactctttccctacacgacgctcttccgatctatcccttggagaaccaccttgttg

SEQ ID NO: 255 - DNA, 50 bp, Artificial Sequence
  Synthetic
tggagttcagacgtgtgctcttccgatctcaaccaacgctatcggcatgg

SEQ ID NO: 256 - DNA, 60 bp, Artificial Sequence
  Synthetic
  misc_feature (34)..(37): n is a, c, g, or t
acactctttccctacacgacgctcttccgatctnnnncagggaaacgcccatgcaattag

SEQ ID NO: 257 - DNA, 51 bp, Artificial Sequence
  Synthetic
tggagttcagacgtgtgctcttccgatctctctgttgagctcgaccctgaa

SEQ ID NO: 258 - DNA, 57 bp, Artificial Sequence
  Synthetic
  misc_feature (34)..(37): n is a, c, g, or t
acactctttccctacacgacgctcttccgatctnnnncagctcagcctgagtgttga

SEQ ID NO: 259 - DNA, 48 bp, Artificial Sequence
  Synthetic
tggagttcagacgtgtgctcttccgatctctcgtgggtttgtggttgc

SEQ ID NO: 260 - DNA, 60 bp, Artificial Sequence
  Synthetic
  misc_feature (34)..(37): n is a, c, g, or t
acactctttccctacacgacgctcttccgatctnnnnttagccaacatacagaagtcagg

SEQ ID NO: 261 - DNA, 50 bp, Artificial Sequence
  Synthetic
tggagttcagacgtgtgctcttccgatctagaccatagcacttcccttcc

SEQ ID NO: 262 - DNA, 58 bp, Artificial Sequence
  Synthetic
  misc_feature (34)..(37): n is a, c, g, or t
acactctttccctacacgacgctcttccgatctnnnncgatggatgtggcgcaggtag

SEQ ID NO: 263 - DNA, 51 bp, Artificial Sequence
  Synthetic
tggagttcagacgtgtgctcttccgatctagacgctgggagattgacatgc

SEQ ID NO: 264 - DNA, 59 bp, Artificial Sequence
  Synthetic
  misc_feature (34)..(37): n is a, c, g, or t
acactctttccctacacgacgctcttccgatctnnnntcacaaacaagacagggaactg

SEQ ID NO: 265 - DNA, 50 bp, Artificial Sequence
  Synthetic
tggagttcagacgtgtgctcttccgatctagatgtagggctagaggggtg

SEQ ID NO: 266 - DNA, 58 bp, Artificial Sequence
  Synthetic
  misc_feature (34)..(37): n is a, c, g, or t
acactctttccctacacgacgctcttccgatctnnnncacaacagcttcatgtcagcc

SEQ ID NO: 267 - DNA, 52 bp, Artificial Sequence
  Synthetic
tggagttcagacgtgtgctcttccgatctacgttaatgtttcctgatggtcc

SEQ ID NO: 268 - DNA, 59 bp, Artificial Sequence
  Synthetic
  misc_feature (34)..(37): n is a, c, g, or t
acactctttccctacacgacgctcttccgatctnnnnacttggtgccaaattcttctcc

SEQ ID NO: 269 - DNA, 50 bp, Artificial Sequence
  Synthetic
tggagttcagacgtgtgctcttccgatctaaagagggaatgggctttgga

SEQ ID NO: 270 - DNA, 57 bp, Artificial Sequence
  Synthetic
  misc_feature (34)..(37): n is a, c, g, or t
acactctttccctacacgacgctcttccgatctnnnngaacccaggtagccagagac

SEQ ID NO: 271 - DNA, 49 bp, Artificial Sequence
  Synthetic
tggagttcagacgtgtgctcttccgatcttcctttcaacccgaacggag

SEQ ID NO: 272 - DNA, 51 bp, Artificial Sequence
  Synthetic
tggagttcagacgtgtgctcttccgatctgtcttctctgtctccacatgcc

SEQ ID NO: 273 - DNA, 57 bp, Artificial Sequence
  Synthetic
  misc_feature (34)..(37): n is a, c, g, or t
acactctttccctacacgacgctcttccgatctnnnngtcagtggaacaagccgagt

SEQ ID NO: 274 - DNA, 49 bp, Artificial Sequence
  Synthetic
tggagttcagacgtgtgctcttccgatctacttggttggggtaacggtg

SEQ ID NO: 275 - DNA, 60 bp, Artificial Sequence
  Synthetic
  misc_feature (34)..(37): n is a, c, g, or t
acactctttccctacacgacgctcttccgatctnnnncttcagaaggcccagggacaaag

SEQ ID NO: 276 - DNA, 51 bp, Artificial Sequence
  Synthetic
tggagttcagacgtgtgctcttccgatctctggtactgggctccgcaattt

SEQ ID NO: 277 - DNA, 57 bp, Artificial Sequence
  Synthetic
  misc_feature (34)..(37): n is a, c, g, or t
acactctttccctacacgacgctcttccgatctnnnntcttgagggccttgcgcttc

SEQ ID NO: 278 - DNA, 51 bp, Artificial Sequence
  Synthetic
tggagttcagacgtgtgctcttccgatctccttcatcagtctggaccgcta

SEQ ID NO: 279 - DNA, 59 bp, Artificial Sequence
  Synthetic
  misc_feature (34)..(37): n is a, c, g, or t
acactctttccctacacgacgctcttccgatctnnnnggaccaggacaggaaggaggaa

SEQ ID NO: 280 - DNA, 51 bp, Artificial Sequence
  Synthetic
tggagttcagacgtgtgctcttccgatctgtggcaggtacaaagtgggagg

SEQ ID NO: 281 - DNA, 58 bp, Artificial Sequence
  Synthetic
  misc_feature (34)..(37): n is a, c, g, or t
acactctttccctacacgacgctcttccgatctnnnntcttcatccctagccagccgc

SEQ ID NO: 282 - DNA, 53 bp, Artificial Sequence
  Synthetic
tggagttcagacgtgtgctcttccgatctaacggctgacaaaagaagtcctgg

SEQ ID NO: 283 - DNA, 55 bp, Artificial Sequence
  Synthetic
  misc_feature (34)..(37): n is a, c, g, or t
acactctttccctacacgacgctcttccgatctnnnnccttcgggcatagcatgg

SEQ ID NO: 284 - DNA, 44 bp, Artificial Sequence
  Synthetic
tggagttcagacgtgtgctcttccgatctcctcggcatcggtcc

SEQ ID NO: 285 - DNA, 60 bp, Artificial Sequence
  Synthetic
  misc_feature (34)..(37): n is a, c, g, or t
acactctttccctacacgacgctcttccgatctnnnnagtcagtgcctcacctctcacac

SEQ ID NO: 286 - DNA, 52 bp, Artificial Sequence
  Synthetic
tggagttcagacgtgtgctcttccgatctcttgcagatcgaggagactggca

SEQ ID NO: 287 - DNA, 60 bp, Artificial Sequence
  Synthetic
  misc_feature (34)..(37): n is a, c, g, or t
acactctttccctacacgacgctcttccgatctnnnntgaagtcatgtgcggtctggtca

SEQ ID NO: 288 - DNA, 51 bp, Artificial Sequence
  Synthetic
tggagttcagacgtgtgctcttccgatctagctcacagcctcatgaaggga

SEQ ID NO: 289 - DNA, 59 bp, Artificial Sequence
  Synthetic
  misc_feature (34)..(37): n is a, c, g, or t
acactctttccctacacgacgctcttccgatctnnnnaccagctacttgctcttgcgtg

SEQ ID NO: 290 - DNA, 53 bp, Artificial Sequence
  Synthetic
tggagttcagacgtgtgctcttccgatctcgtagatggcttcttcaggtagca

SEQ ID NO: 291 - DNA, 57 bp, Artificial Sequence
  Synthetic
  misc_feature (34)..(37): n is a, c, g, or t
acactctttccctacacgacgctcttccgatctnnnntcccctgttgacctggagaa

SEQ ID NO: 292 - DNA, 49 bp, Artificial Sequence
  Synthetic
tggagttcagacgtgtgctcttccgatctcactgtacttgccctgacca

SEQ ID NO: 293 - DNA, 57 bp, Artificial Sequence
  Synthetic
  misc_feature (34)..(37): n is a, c, g, or t
acactctttccctacacgacgctcttccgatctnnnnttggtgttgacagggagcaa

SEQ ID NO: 294 - DNA, 49 bp, Artificial Sequence
  Synthetic
tggagttcagacgtgtgctcttccgatctctgagatgtgggcagaaggg

SEQ ID NO: 295 - DNA, 57 bp, Artificial Sequence
  Synthetic
  misc_feature (34)..(37): n is a, c, g, or t
acactctttccctacacgacgctcttccgatctnnnntgagagggaacagaagggct

SEQ ID NO: 296 - DNA, 49 bp, Artificial Sequence
  Synthetic
tggagttcagacgtgtgctcttccgatctgtccaaaggcccaagaacct

SEQ ID NO: 297 - DNA, 58 bp, Artificial Sequence
  Synthetic
  misc_feature (34)..(37): n is a, c, g, or t
acactctttccctacacgacgctcttccgatctnnnntcctagcactttggaaggtcg

SEQ ID NO: 298 - DNA, 51 bp, Artificial Sequence
  Synthetic
tggagttcagacgtgtgctcttccgatctgctcatcttaatctgctcagcc

SEQ ID NO: 299 - DNA, 59 bp, Artificial Sequence
  Synthetic
  misc_feature (34)..(37): n is a, c, g, or t
acactctttccctacacgacgctcttccgatctnnnngcgggcagtggcgtcttagtcg

SEQ ID NO: 300 - DNA, 51 bp, Artificial Sequence
  Synthetic
tggagttcagacgtgtgctcttccgatctccctgggtttggttggctgctc

SEQ ID NO: 301 - DNA, 58 bp, Artificial Sequence
  Synthetic
  misc_feature (34)..(37): n is a, c, g, or t
acactctttccctacacgacgctcttccgatctnnnnctccttgccgcccagccggtc

SEQ ID NO: 302 - DNA, 52 bp, Artificial Sequence
  Synthetic
tggagttcagacgtgtgctcttccgatctcactggggaagaggcgaggacac

SEQ ID NO: 303 - DNA, 60 bp, Artificial Sequence
  Synthetic
  misc_feature (34)..(37): n is a, c, g, or t
acactctttccctacacgacgctcttccgatctnnnnccagtgtttcccatccccaacac

SEQ ID NO: 304 - DNA, 52 bp, Artificial Sequence
  Synthetic
tggagttcagacgtgtgctcttccgatctgaatggatccccccctagagctc

SEQ ID NO: 305 - DNA, 59 bp, Artificial Sequence
  Synthetic
  misc_feature (34)..(37): n is a, c, g, or t
acactctttccctacacgacgctcttccgatctnnnncaggcccacaggtccttctgga

SEQ ID NO: 306 - DNA, 50 bp, Artificial Sequence
  Synthetic
tggagttcagacgtgtgctcttccgatctccacacggaaggctgaccacg

SEQ ID NO: 307 - DNA, 62 bp, Artificial Sequence
  Synthetic
  misc_feature (34)..(37): n is a, c, g, or t
acactctttccctacacgacgctcttccgatctnnnngtggggagatttgcatctgtggagg

SEQ ID NO: 308 - DNA, 55 bp, Artificial Sequence
  Synthetic
tggagttcagacgtgtgctcttccgatctgcttttataccatcttggggttacag

SEQ ID NO: 309 - DNA, 61 bp, Artificial Sequence
  Synthetic
  misc_feature (34)..(37): n is a, c, g, or t
acactctttccctacacgacgctcttccgatctnnnncaatgtgcttcaacccatcacggc

SEQ ID NO: 310 - DNA, 56 bp, Artificial Sequence
  Synthetic
tggagttcagacgtgtgctcttccgatctccatgaatttgtgatggatgcagtctg

SEQ ID NO: 311 - DNA, 61 bp, Artificial Sequence
  Synthetic
  misc_feature (34)..(37): n is a, c, g, or t
acactctttccctacacgacgctcttccgatctnnnngagaaggaggtgcaggagctagac

SEQ ID NO: 312 - DNA, 53 bp, Artificial Sequence
  Synthetic
tggagttcagacgtgtgctcttccgatctcatcccgaccttcatccctcctgg

SEQ ID NO: 313 - DNA, 59 bp, Artificial Sequence
  Synthetic
  misc_feature (34)..(37): n is a, c, g, or t
acactctttccctacacgacgctcttccgatctnnnnacaggtgaataaccggtcgcca

SEQ ID NO: 314 - DNA, 57 bp, Artificial Sequence
  Synthetic
tggagttcagacgtgtgctcttccgatcttttatcaaacaaggtgcagatacagcaa

SEQ ID NO: 315 - DNA, 57 bp, Artificial Sequence
  Synthetic
  misc_feature (34)..(37): n is a, c, g, or t
acactctttccctacacgacgctcttccgatctnnnnggcatggcttctgagactca

SEQ ID NO: 316 - DNA, 53 bp, Artificial Sequence
  Synthetic
tggagttcagacgtgtgctcttccgatctgtctcccttgcactccctgtcttt

SEQ ID NO: 317 - DNA, 57 bp, Artificial Sequence
  Synthetic
  misc_feature (34)..(37): n is a, c, g, or t
acactctttccctacacgacgctcttccgatctnnnntttggcaatggaggcattgg

SEQ ID NO: 318 - DNA, 49 bp, Artificial Sequence
  Synthetic
tggagttcagacgtgtgctcttccgatctgaagaggctgcccatgagag

SEQ ID NO: 319 - DNA, 57 bp, Artificial Sequence
  Synthetic
  misc_feature (34)..(37): n is a, c, g, or t
acactctttccctacacgacgctcttccgatctnnnnggtctgaggctcgaatcctg

SEQ ID NO: 320 - DNA, 49 bp, Artificial Sequence
  Synthetic
tggagttcagacgtgtgctcttccgatctctgtggcctccatatccctg

SEQ ID NO: 321 - DNA, 57 bp, Artificial Sequence
  Synthetic
  misc_feature (34)..(37): n is a, c, g, or t
acactctttccctacacgacgctcttccgatctnnnntttccaccagaactcagccc

SEQ ID NO: 322 - DNA, 49 bp, Artificial Sequence
  Synthetic
tggagttcagacgtgtgctcttccgatctcctcggttcctccacaacac

SEQ ID NO: 323 - DNA, 58 bp, Artificial Sequence
  Synthetic
acactctttccctacacgacgctcttccgatctggaggatgacgagttggccctagac

SEQ ID NO: 324 - DNA, 55 bp, Artificial Sequence
  Synthetic
tggagttcagacgtgtgctcttccgatctccaaagagacagcagttggaacatga

SEQ ID NO: 325 - DNA, 58 bp, Artificial Sequence
  Synthetic
acactctttccctacacgacgctcttccgatctagtggagtggaggaggggagagaaa

SEQ ID NO: 326 - DNA, 54 bp, Artificial Sequence
  Synthetic
tggagttcagacgtgtgctcttccgatctttgcagtttcatcactgtctgcggt

SEQ ID NO: 327 - DNA, 58 bp, Artificial Sequence
  Synthetic
acactctttccctacacgacgctcttccgatctctactgtcctactgtgcctggctcc

SEQ ID NO: 328 - DNA, 54 bp, Artificial Sequence
  Synthetic
tggagttcagacgtgtgctcttccgatctcagcctgggcaagataatgagaccc

SEQ ID NO: 329 - DNA, 58 bp, Artificial Sequence
  Synthetic
acactctttccctacacgacgctcttccgatctctggtgcacagagcagaaccatcct

SEQ ID NO: 330 - DNA, 54 bp, Artificial Sequence
  Synthetic
tggagttcagacgtgtgctcttccgatctgcaacctcaaaagctgcctcccttt

SEQ ID NO: 331 - DNA, 58 bp, Artificial Sequence
  Synthetic
acactctttccctacacgacgctcttccgatctctgtagtcccagctattcgggaggc

SEQ ID NO: 332 - DNA, 54 bp, Artificial Sequence
  Synthetic
tggagttcagacgtgtgctcttccgatctaaatgaccccttcctgcccatcact

SEQ ID NO: 333 - DNA, 59 bp, Artificial Sequence
  Synthetic
acactctttccctacacgacgctcttccgatcttggaaaaggaactgcatctgtgacgg

SEQ ID NO: 334 - DNA, 55 bp, Artificial Sequence
  Synthetic
tggagttcagacgtgtgctcttccgatctttttcctaatcccctgtgaaacctgt

SEQ ID NO: 335 - DNA, 56 bp, Artificial Sequence
  Synthetic
acactctttccctacacgacgctcttccgatctaacaatgttcatggttgtgatgt

SEQ ID NO: 336 - DNA, 54 bp, Artificial Sequence
  Synthetic
tggagttcagacgtgtgctcttccgatctctggatctccccttgaacctttgga

SEQ ID NO: 337 - DNA, 58 bp, Artificial Sequence
  Synthetic
acactctttccctacacgacgctcttccgatctttgatgtcctgcgtctagggtctgc

SEQ ID NO: 338 - DNA, 54 bp, Artificial Sequence
  Synthetic
tggagttcagacgtgtgctcttccgatctgactggagccttggacaggttgaga

SEQ ID NO: 339 - DNA, 59 bp, Artificial Sequence
  Synthetic
acactctttccctacacgacgctcttccgatctgccactgctatttgaaagagttgctc

SEQ ID NO: 340 - DNA, 53 bp, Artificial Sequence
  Synthetic
tggagttcagacgtgtgctcttccgatctcacacctggctaaatgctcggatt

SEQ ID NO: 341 - DNA, 58 bp, Artificial Sequence
  Synthetic
acactctttccctacacgacgctcttccgatcttccaagattccttccctggccactc

SEQ ID NO: 342 - DNA, 54 bp, Artificial Sequence
  Synthetic
tggagttcagacgtgtgctcttccgatctactgtctgtagtcctggcttcgtgg

SEQ ID NO: 343 - DNA, 59 bp, Artificial Sequence
  Synthetic
acactctttccctacacgacgctcttccgatctagcagcaaactgaacaggtcaccaac

SEQ ID NO: 344 - DNA, 55 bp, Artificial Sequence
  Synthetic
tggagttcagacgtgtgctcttccgatctgctacactgtggcatcagcacatatc

SEQ ID NO: 345 - DNA, 59 bp, Artificial Sequence
  Synthetic
acactctttccctacacgacgctcttccgatctgctgaaagcaacctaagctgtggtga

SEQ ID NO: 346 - DNA, 54 bp, Artificial Sequence
  Synthetic
tggagttcagacgtgtgctcttccgatcttgctataagagctgagcagacgaca

SEQ ID NO: 347 - DNA, 58 bp, Artificial Sequence
  Synthetic
acactctttccctacacgacgctcttccgatctccagcccccatgtacactgtagtcg

SEQ ID NO: 348 - DNA, 54 bp, Artificial Sequence
  Synthetic
tggagttcagacgtgtgctcttccgatctcccaccccaaggccaaaatcagtaa

SEQ ID NO: 349 - DNA, 58 bp, Artificial Sequence
  Synthetic
acactctttccctacacgacgctcttccgatctgtctcggctacttgggaggcttagg

SEQ ID NO: 350 - DNA, 54 bp, Artificial Sequence
  Synthetic
tggagttcagacgtgtgctcttccgatctccgactaaagaggtcattcacttgt

SEQ ID NO: 351 - DNA, 58 bp, Artificial Sequence
  Synthetic
acactctttccctacacgacgctcttccgatctagcatgtttgcagccttcttctgga

SEQ ID NO: 352 - DNA, 55 bp, Artificial Sequence
  Synthetic
tggagttcagacgtgtgctcttccgatctagaacttctctcacaatgtagcccct

SEQ ID NO: 353 - DNA, 58 bp, Artificial Sequence
  Synthetic
acactctttccctacacgacgctcttccgatctgctgaggctaaacactatcatgcca

SEQ ID NO: 354 - DNA, 54 bp, Artificial Sequence
  Synthetic
tggagttcagacgtgtgctcttccgatctcagaggttgcagtgagccgagattg

SEQ ID NO: 355 - DNA, 60 bp, Artificial Sequence
  Synthetic
acactctttccctacacgacgctcttccgatctacatcttcaggtcaggaaaacagctcg

SEQ ID NO: 356 - DNA, 54 bp, Artificial Sequence
  Synthetic
tggagttcagacgtgtgctcttccgatcttaatgacttgggctttggaagcagc

SEQ ID NO: 357 - DNA, 21 bp, Artificial Sequence
  Synthetic
cttcgtgcgcttctttcaggg

SEQ ID NO: 358 - DNA, 21 bp, Artificial Sequence
  Synthetic
gcagattctttgctcctgccg

SEQ ID NO: 359 - DNA, 21 bp, Artificial Sequence
  Synthetic
cgctgagtgatgccaacaagg

SEQ ID NO: 360 - DNA, 21 bp, Artificial Sequence
  Synthetic
agccctccgttgaggttcttc

SEQ ID NO: 361 - DNA, 21 bp, Artificial Sequence
  Synthetic
aagacaatggcaccgggatca

SEQ ID NO: 362 - DNA, 21 bp, Artificial Sequence
  Synthetic
aagcctcacctcgaaagccat

SEQ ID NO: 363 - DNA, 21 bp, Artificial Sequence
  Synthetic
ctgggcaggtggtactgagtc

SEQ ID NO: 364 - DNA, 21 bp, Artificial Sequence
  Synthetic
tagtggcaccagcatccagac

SEQ ID NO: 365 - DNA, 19 bp, Artificial Sequence
  Synthetic
gaggcactcttccagcctt

SEQ ID NO: 366 - DNA, 20 bp, Artificial Sequence
  Synthetic
aaggtagtttcgtggatgcc

SEQ ID NO: 367 - DNA, 20 bp, Artificial Sequence
  Synthetic
gacagtggtgaaccgcatcg

SEQ ID NO: 368 - DNA, 25 bp, Artificial Sequence
  Synthetic
gtgcggtgaattctctcgccaacaa

SEQ ID NO: 369 - DNA, 25 bp, Artificial Sequence
  Synthetic
gtgcggtgaattctctcgccaaagt

SEQ ID NO: 370 - DNA, 24 bp, Artificial Sequence
  Synthetic
gtggggtgaattctttgccaaagt

SEQ ID NO: 371 - protein, 7 aa, Artificial Sequence
  Synthetic
HLDRFSE

SEQ ID NO: 372 - DNA, 19 bp, Artificial Sequence
  Synthetic
acctggatcgcttttccga

SEQ ID NO: 373 - DNA, 19 bp, Artificial Sequence
  Synthetic
acctgtatcgcttttccga

SEQ ID NO: 374 - DNA, 19 bp, Artificial Sequence
  Synthetic
acctatatcgcttttccga

SEQ ID NO: 375 - DNA, 19 bp, Artificial Sequence
  Synthetic
acctataccgcttttccga

SEQ ID NO: 376 - DNA, 19 bp, Artificial Sequence
  Synthetic
acttataccgcttttccga

SEQ ID NO: 377 - DNA, 19 bp, Artificial Sequence
  Synthetic
atttataccgcttttccga

SEQ ID NO: 378 - protein, 6 aa, Artificial Sequence
  Synthetic
MASDSI

SEQ ID NO: 379 - DNA, 20 bp, Artificial Sequence
  Synthetic
cgatggcttcagacagcata

SEQ ID NO: 380 - DNA, 20 bp, Artificial Sequence
  Synthetic
cgatgtcttcagacagcata

SEQ ID NO: 381 - DNA, 20 bp, Artificial Sequence
  Synthetic
cgatgtcgtcagacagcata

SEQ ID NO: 382 - DNA, 20 bp, Artificial Sequence
  Synthetic
cgatgtcgagcgacagcata

SEQ ID NO: 383 - DNA, 20 bp, Artificial Sequence
  Synthetic
cgatgtcgtcggacagcata

SEQ ID NO: 384 - DNA, 20 bp, Artificial Sequence
  Synthetic
cgatgtcgtcggatagcata

SEQ ID NO: 385 - DNA, 19 bp, Artificial Sequence
  Synthetic
ttgcacaattccccagtcc

SEQ ID NO: 386 - DNA, 19 bp, Artificial Sequence
  Synthetic
ggactggggaattgtgcaa

SEQ ID NO: 387 - DNA, 20 bp, Artificial Sequence
  Synthetic
ttgacacaattccccaatcc

SEQ ID NO: 388 - DNA, 20 bp, Artificial Sequence
  Synthetic
ggattggggaattgtgtcaa

SEQ ID NO: 389 - RNA, 129 nt, Artificial Sequence
  Synthetic
gucugauaggcagccugcacuggguuuuaguacucuggaagcagaaucuacuaaaacaaggcaaaaugccguguuuaucucgucaacuuguuggcgagagaauucaccgcaccagugcaggcuuuuuuu

SEQ ID NO: 390 - DNA, 24 bp, Artificial Sequence
  Synthetic
tggtgcggtgaattctctcgccaa

SEQ ID NO: 391 - DNA, 23 bp, Artificial Sequence
  Synthetic
tggtggggtgaattctttgccaa

SEQ ID NO: 392 - RNA, 129 nt, Artificial Sequence
  Synthetic
gucugauaggcagccugcacuggguuuuaguacucuggaagcagaaucuacuaaaacaaggcaaaaugccguguuuaucucggcaucuugaugucgagagaauucaccgcaccagugcaggcuuuuuuu

SEQ ID NO: 393 - DNA, 24 bp, Artificial Sequence
  Synthetic
tggtgcggtgaattctctcgacat

SEQ ID NO: 394 - DNA, 12 bp, Artificial Sequence
  Synthetic
tgatggcagagg

SEQ ID NO: 395 - DNA, 12 bp, Artificial Sequence
  Synthetic
agatggcagagg

SEQ ID NO: 396 - DNA, 12 bp, Artificial Sequence
  Synthetic
atatggcagagg

SEQ ID NO: 397 - DNA, 12 bp, Artificial Sequence
  Synthetic
atctggcagagg

SEQ ID NO: 398 - DNA, 12 bp, Artificial Sequence
  Synthetic
atccggcagagg

SEQ ID NO: 399 - DNA, 12 bp, Artificial Sequence
  Synthetic
atccagcagagg

SEQ ID NO: 400 - DNA, 12 bp, Artificial Sequence
  Synthetic
tgatggctgagg

SEQ ID NO: 401 - DNA, 12 bp, Artificial Sequence
  Synthetic
tgatggctcagg

SEQ ID NO: 402 - DNA, 12 bp, Artificial Sequence
  Synthetic
tgatggctccgg

SEQ ID NO: 403 - DNA, 12 bp, Artificial Sequence
  Synthetic
tgatggttccgg

SEQ ID NO: 404 - DNA, 12 bp, Artificial Sequence
  Synthetic
tgatggttcccg

SEQ ID NO: 405 - DNA, 12 bp, Artificial Sequence
  Synthetic
acctggatcgct

SEQ ID NO: 406 - DNA, 12 bp, Artificial Sequence
  Synthetic
acgtggatcgct

SEQ ID NO: 407 - DNA, 12 bp, Artificial Sequence
  Synthetic
acgaggatcgct

SEQ ID NO: 408 - DNA, 12 bp, Artificial Sequence
  Synthetic
acgaagatcgct

SEQ ID NO: 409 - DNA, 12 bp, Artificial Sequence
  Synthetic
acgaatatcgct

SEQ ID NO: 410 - DNA, 12 bp, Artificial Sequence
  Synthetic
acgaatctcgct

SEQ ID NO: 411 - DNA, 12 bp, Artificial Sequence
  Synthetic
acctggatagct

SEQ ID NO: 412 - DNA, 12 bp, Artificial Sequence
  Synthetic
acctggatatct

SEQ ID NO: 413 - DNA, 12 bp, Artificial Sequence
  Synthetic
acctggagatct

SEQ ID NO: 414 - DNA, 12 bp, Artificial Sequence
  Synthetic
acctggagatat

SEQ ID NO: 415 - DNA, 12 bp, Artificial Sequence
  Synthetic
acctggcgatat

SEQ ID NO: 416 - DNA, 12 bp, Artificial Sequence
  Synthetic
ctgaggtgttcg

SEQ ID NO: 417 - DNA, 12 bp, Artificial Sequence
  Synthetic
ctgaggtgatcg

SEQ ID NO: 418 - DNA, 12 bp, Artificial Sequence
  Synthetic
ctgaggtaatcg

SEQ ID NO: 419 - DNA, 12 bp, Artificial Sequence
  Synthetic
ctgaggtaagcg

SEQ ID NO: 420 - DNA, 12 bp, Artificial Sequence
  Synthetic
ctgaggcaagcg

SEQ ID NO: 421 - DNA, 12 bp, Artificial Sequence
  Synthetic
ctgaggcaagag

SEQ ID NO: 422 - DNA, 12 bp, Artificial Sequence
  Synthetic
acaggggtgacg

SEQ ID NO: 423 - DNA, 12 bp, Artificial Sequence
  Synthetic
acagggatgacg

SEQ ID NO: 424 - DNA, 12 bp, Artificial Sequence
  Synthetic
acagggacgacg

SEQ ID NO: 425 - DNA, 12 bp, Artificial Sequence
  Synthetic
acagggaccacg

SEQ ID NO: 426 - DNA, 12 bp, Artificial Sequence
  Synthetic
acagggacctcg

SEQ ID NO: 427 - DNA, 12 bp, Artificial Sequence
  Synthetic
acagggaccttg

SEQ ID NO: 428 - DNA, 12 bp, Artificial Sequence
  Synthetic
tgagggctccag

SEQ ID NO: 429 - DNA, 12 bp, Artificial Sequence
  Synthetic
tgagggctgcag

SEQ ID NO: 430 - DNA, 12 bp, Artificial Sequence
  Synthetic
tgagggctgtag

SEQ ID NO: 431 - DNA, 12 bp, Artificial Sequence
  Synthetic
tgagggcggtag

SEQ ID NO: 432 - DNA, 12 bp, Artificial Sequence
  Synthetic
tgagggcggttg

SEQ ID NO: 433 - DNA, 12 bp, Artificial Sequence
  Synthetic
tgagggaggttg

SEQ ID NO: 434 - DNA, 23 bp, Artificial Sequence
  Synthetic
ctctggaatccattctggtgcca

SEQ ID NO: 435 - DNA, 23 bp, Artificial Sequence
  Synthetic
ctctgtaatccattctggtgcca

SEQ ID NO: 436 - DNA, 23 bp, Artificial Sequence
  Synthetic
ctctgtcatccattctggtgcca

SEQ ID NO: 437 - DNA, 23 bp, Artificial Sequence
  Synthetic
ctcggtcatccattctggtgcca

SEQ ID NO: 438 - DNA, 23 bp, Artificial Sequence
  Synthetic
ctcggtcatacattctggtgcca

SEQ ID NO: 439 - DNA, 23 bp, Artificial Sequence
  Synthetic
cagcgtcatccattctggtgcca

SEQ ID NO: 440 - DNA, 17 bp, Artificial Sequence
  Synthetic
tagtgggaggcttggga

SEQ ID NO: 441 - DNA, 17 bp, Artificial Sequence
  Synthetic
aagtcggaggcttggga

SEQ ID NO: 442 - DNA, 17 bp, Artificial Sequence
  Synthetic
aaatcggaggcttggga

SEQ ID NO: 443 - DNA, 17 bp, Artificial Sequence
  Synthetic
aaatccgaggcttggga

SEQ ID NO: 444 - DNA, 19 bp, Artificial Sequence
  Synthetic
gaagggctcccatcacatc

SEQ ID NO: 445 - DNA, 19 bp, Artificial Sequence
  Synthetic
gaagtgctcccatcacatc

SEQ ID NO: 446 - DNA, 19 bp, Artificial Sequence
  Synthetic
gaaatgctcccatcacatc

SEQ ID NO: 447 - DNA, 19 bp, Artificial Sequence
  Synthetic
gaaatgttcccatcacatc

SEQ ID NO: 448 - DNA, 19 bp, Artificial Sequence
  Synthetic
gaaatgtagccatcacatc

SEQ ID NO: 449 - DNA, 16 bp, Artificial Sequence
  Synthetic
ctgaggtgttcgttgt

SEQ ID NO: 450 - DNA, 16 bp, Artificial Sequence
  Synthetic
ctgatgtgttcgttgt

SEQ ID NO: 451 - DNA, 16 bp, Artificial Sequence
  Synthetic
ctggtgtgttcgttgt

SEQ ID NO: 452 - DNA, 16 bp, Artificial Sequence
  Synthetic
ctggtgggttcgttgt

SEQ ID NO: 453 - DNA, 16 bp, Artificial Sequence
  Synthetic
ttggtgtgttcgttgt

SEQ ID NO: 454 - DNA, 16 bp, Artificial Sequence
  Synthetic
ttggtgggttcgttgt

SEQ ID NO: 455 - DNA, 24 bp, Artificial Sequence
  Synthetic
sggssggssggssggssggssggs

SEQ ID NO: 456 - DNA, 32 bp, Artificial Sequence
  Synthetic
sggssggssggssggssggssggssggssggs

SEQ ID NO: 457 - DNA, 40 bp, Artificial Sequence
  Synthetic
sggssggssggssggssggssggssggssggssggssggs

SEQ ID NO: 458 - DNA, 24 bp, Artificial Sequence
  Synthetic
ggsgggsgggsgggsgggsgggsg

SEQ ID NO: 459 - DNA, 32 bp, Artificial Sequence
  Synthetic
sggssggsggsgggsgggsgggsgsggssggs

SEQ ID NO: 460 - DNA, 27 bp, Artificial Sequence
  Synthetic
tggtgcggtgaattctctcgccaacaa

SEQ ID NO: 461 - DNA, 26 bp, Artificial Sequence
  Synthetic
tggtggggtgaattctttgccaaagt

SEQ ID NO: 462 - DNA, 27 bp, Artificial Sequence
  Synthetic
tggtgcggtgaattctctcgacatcaa

SEQ ID NO: 463 - DNA, 20 bp, Artificial Sequence
  Synthetic
gcccacctcaggcaacaaag

SEQ ID NO: 464 - DNA, 20 bp, Artificial Sequence
  Synthetic
gcggcgcgactcctacccta

SEQ ID NO: 465 - DNA, 20 bp, Artificial Sequence
  Synthetic
ggccagttagcccttagggt

SEQ ID NO: 466 - DNA, 20 bp, Artificial Sequence
  Synthetic
gactgggtccggtgcggcac

SEQ ID NO: 467 - DNA, 20 bp, Artificial Sequence
  Synthetic
ggacgcgcgctccaagatgg

SEQ ID NO: 468 - DNA, 20 bp, Artificial Sequence
  Synthetic
gggcacgggcgtcgcggaac

SEQ ID NO: 469 - DNA, 20 bp, Artificial Sequence
  Synthetic
gagtcgtggctgcagcgctg

SEQ ID NO: 470 - DNA, 20 bp, Artificial Sequence
  Synthetic
ggctgaggcgagaggttggt

SEQ ID NO: 471 - DNA, 20 bp, Artificial Sequence
  Synthetic
gtctccggccataatgaccc

SEQ ID NO: 472 - DNA, 20 bp, Artificial Sequence
  Synthetic
gccactatggacaggtaaag

SEQ ID NO: 473 - DNA, 20 bp, Artificial Sequence
  Synthetic
ggacactctggacaccacta

SEQ ID NO: 474 - DNA, 20 bp, Artificial Sequence
  Synthetic
gttctggcctgagacttgca

SEQ ID NO: 475 - DNA, 20 bp, Artificial Sequence
  Synthetic
gaatcccgcagtcaccctgg

SEQ ID NO: 476 - DNA, 20 bp, Artificial Sequence
  Synthetic
gaggccaccagggtgactgc

SEQ ID NO: 477 - DNA, 20 bp, Artificial Sequence
  Synthetic
gtcccaccacgaggccacca

SEQ ID NO: 478 - DNA, 20 bp, Artificial Sequence
  Synthetic
gagactgcggagtgggtcag

SEQ ID NO: 479 - DNA, 20 bp, Artificial Sequence
  Synthetic
gaggttccgatcacagactg

SEQ ID NO: 480 - DNA, 20 bp, Artificial Sequence
  Synthetic
ggcaaacccggtaggacttg

SEQ ID NO: 481 - DNA, 20 bp, Artificial Sequence
  Synthetic
gcggcgggcccatccggaac

SEQ ID NO: 482 - DNA, 20 bp, Artificial Sequence
  Synthetic
gcgggcgcggaatcgggcat

SEQ ID NO: 483 - DNA, 20 bp, Artificial Sequence
  Synthetic
gggaggcggcaggaaccgac

SEQ ID NO: 484 - DNA, 20 bp, Artificial Sequence
  Synthetic
gcgtatctgcaccggcccga

SEQ ID NO: 485 - DNA, 20 bp, Artificial Sequence
  Synthetic
ggaggagctaggctgccatc

SEQ ID NO: 486 - DNA, 20 bp, Artificial Sequence
  Synthetic
gtctttgtgctcgggttagg

SEQ ID NO: 487 - DNA, 20 bp, Artificial Sequence
  Synthetic
gagttcgctcgcgcctaggt

SEQ ID NO: 488 - DNA, 20 bp, Artificial Sequence
  Synthetic
ggctcgcgcctaggttggcg

SEQ ID NO: 489 - DNA, 20 bp, Artificial Sequence
  Synthetic
gtcccagcccgcgccaacct

SEQ ID NO: 490 - DNA, 20 bp, Artificial Sequence
  Synthetic
gcaccgagggagggcctcaa

SEQ ID NO: 491 - DNA, 20 bp, Artificial Sequence
  Synthetic
gcgctgctgggagtaagtgt

SEQ ID NO: 492 - DNA, 20 bp, Artificial Sequence
  Synthetic
gggccgggctctgagaggac

SEQ ID NO: 493 - DNA, 20 bp, Artificial Sequence
  Synthetic
gaaaggtaaaatggatccgg

SEQ ID NO: 494 - DNA, 20 bp, Artificial Sequence
  Synthetic
gcaacttatgactccagagg

SEQ ID NO: 495 - DNA, 20 bp, Artificial Sequence
  Synthetic
ggcacaacttatgactccag

SEQ ID NO: 496 - DNA, 20 bp, Artificial Sequence
  Synthetic
gctgtgacaatctcaaaggg

SEQ ID NO: 497 - DNA, 20 bp, Artificial Sequence
  Synthetic
gtccatggcccagaaggaag

SEQ ID NO: 498 - DNA, 20 bp, Artificial Sequence
  Synthetic
gtgtggctcaggagtcactg

SEQ ID NO: 499 - DNA, 20 bp, Artificial Sequence
  Synthetic
gacagaccaggaaccgagaa

SEQ ID NO: 500 - DNA, 20 bp, Artificial Sequence
  Synthetic
gagcaagtcgcaagagcggg

SEQ ID NO: 501 - DNA, 20 bp, Artificial Sequence
  Synthetic
gcgctcttgcgacttgctca

SEQ ID NO: 502 - DNA, 20 bp, Artificial Sequence
  Synthetic
gagcctgactgggattcgtg

SEQ ID NO: 503 - DNA, 20 bp, Artificial Sequence
  Synthetic
gcaggacaaagagcctgact

SEQ ID NO: 504 - DNA, 20 bp, Artificial Sequence
  Synthetic
gttcaaaaaaagagcgggac

SEQ ID NO: 505 - DNA, 20 bp, Artificial Sequence
  Synthetic
gcagagctcccaggaatagt

SEQ ID NO: 506 - DNA, 20 bp, Artificial Sequence
  Synthetic
gcagcgcttcagaaaagagt

SEQ ID NO: 507 - DNA, 20 bp, Artificial Sequence
  Synthetic
gttcagaaaagagtgggaca

SEQ ID NO: 508 - DNA, 20 bp, Artificial Sequence
  Synthetic
gcagagcaggaaaaagagcc

SEQ ID NO: 509 - DNA, 20 bp, Artificial Sequence
  Synthetic
ggccctgccatgactttcgg

SEQ ID NO: 510 - DNA, 20 bp, Artificial Sequence
  Synthetic
gggagggctgtcctgaaacc

SEQ ID NO: 511 - DNA, 20 bp, Artificial Sequence
  Synthetic
gacctgggctgggacagatg

SEQ ID NO: 512 - DNA, 20 bp, Artificial Sequence
  Synthetic
gaggagcctggctgggagta

SEQ ID NO: 513 - DNA, 20 bp, Artificial Sequence
  Synthetic
gtccagagttcaggaatggc

SEQ ID NO: 514 - DNA, 20 bp, Artificial Sequence
  Synthetic
gacttgcccctgcttgtctg

SEQ ID NO: 515 - DNA, 20 bp, Artificial Sequence
  Synthetic
gcagggcaaagagcctgggt

SEQ ID NO: 516 - DNA, 20 bp, Artificial Sequence
  Synthetic
gtagtgcctcagacaagcag

SEQ ID NO: 517 - DNA, 20 bp, Artificial Sequence
  Synthetic
gcagcaagggctttctaact

SEQ ID NO: 518 - DNA, 20 bp, Artificial Sequence
  Synthetic
ggaaagcccttgctgaggtg

SEQ ID NO: 519 - DNA, 20 bp, Artificial Sequence
  Synthetic
gggtagccacacctcagcaa

SEQ ID NO: 520 - DNA, 20 bp, Artificial Sequence
  Synthetic
gcagcccaaggtagtaacag

SEQ ID NO: 521 - DNA, 20 bp, Artificial Sequence
  Synthetic
gcccagccagcagaagagat

SEQ ID NO: 522 - DNA, 20 bp, Artificial Sequence
  Synthetic
ggtccgtctccgacttctgg

SEQ ID NO: 523 - DNA, 20 bp, Artificial Sequence
  Synthetic
gcactctcaggctcgctgag

SEQ ID NO: 524 - DNA, 20 bp, Artificial Sequence
  Synthetic
gcggcgctcgtggaatcttc

SEQ ID NO: 525 - DNA, 20 bp, Artificial Sequence
  Synthetic
gctgcgccgaaaggccttgt

SEQ ID NO: 526 - DNA, 20 bp, Artificial Sequence
  Synthetic
gccggcccggagcgtttgtg

SEQ ID NO: 527 - DNA, 20 bp, Artificial Sequence
  Synthetic
gctgttgtacgggttcccta

SEQ ID NO: 528 - DNA, 20 bp, Artificial Sequence
  Synthetic
ggcgccccggcagtaactta

SEQ ID NO: 529 - DNA, 20 bp, Artificial Sequence
  Synthetic
gaaagcggagagtcacagcg

SEQ ID NO: 530 - DNA, 20 bp, Artificial Sequence
  Synthetic
gcccttgcctgggaatgagg

SEQ ID NO: 531 - DNA, 20 bp, Artificial Sequence
  Synthetic
gtttctccggcagcagaaag

SEQ ID NO: 532 - DNA, 20 bp, Artificial Sequence
  Synthetic
gcaccgggacccatgctggg

SEQ ID NO: 533 - DNA, 20 bp, Artificial Sequence
  Synthetic
gccgaggcggctctcaagga

SEQ ID NO: 534 - DNA, 20 bp, Artificial Sequence
  Synthetic
gcgcgcggccatgatcgccg

SEQ ID NO: 535 - DNA, 20 bp, Artificial Sequence
  Synthetic
gcagaaccagcacccgtcgg

SEQ ID NO: 536 - DNA, 20 bp, Artificial Sequence
  Synthetic
gccatgatgcggagctacgg

SEQ ID NO: 537 - DNA, 20 bp, Artificial Sequence
  Synthetic
ggaggtgagcagctgattga

SEQ ID NO: 538 - DNA, 20 bp, Artificial Sequence
  Synthetic
gaaccgggggggcagcgccg

SEQ ID NO: 539 - DNA, 20 bp, Artificial Sequence
  Synthetic
gccgccgccggccgaggaat

SEQ ID NO: 540 - DNA, 20 bp, Artificial Sequence
  Synthetic
gctcagtcatgggccggcgg

SEQ ID NO: 541 - DNA, 20 bp, Artificial Sequence
  Synthetic
gaagacgcacagacccggcg

SEQ ID NO: 542 - DNA, 20 bp, Artificial Sequence
  Synthetic
gacgcaaagacgcacagacc

SEQ ID NO: 543 - DNA, 20 bp, Artificial Sequence
  Synthetic
gcgcacagacccggcgagga

SEQ ID NO: 544 - DNA, 20 bp, Artificial Sequence
  Synthetic
gccggccagacgtcgtgcag

SEQ ID NO: 545 - DNA, 20 bp, Artificial Sequence
  Synthetic
gggctgtagtttagtgaaat

SEQ ID NO: 546 - DNA, 20 bp, Artificial Sequence
  Synthetic
ggttcaggtgaacaatgtag

SEQ ID NO: 547 - DNA, 20 bp, Artificial Sequence
  Synthetic
gaagaagccgtggccgcggg

SEQ ID NO: 548 - DNA, 20 bp, Artificial Sequence
  Synthetic
gtaggtagctgcgtggctaa

SEQ ID NO: 549 - DNA, 20 bp, Artificial Sequence
  Synthetic
gttgaaccggaagcgggagt

SEQ ID NO: 550 - DNA, 20 bp, Artificial Sequence
  Synthetic
gggagggactgcggcagtgt

SEQ ID NO: 551 - DNA, 20 bp, Artificial Sequence
  Synthetic
gggctggagcagggctgacg

SEQ ID NO: 552 - DNA, 20 bp, Artificial Sequence
  Synthetic
gtgggccaccaggctcggcg

SEQ ID NO: 553 - DNA, 20 bp, Artificial Sequence
  Synthetic
gagcccaaggcggtgagtat

SEQ ID NO: 554 - DNA, 20 bp, Artificial Sequence
  Synthetic
gctcgccggttgagttcaga

SEQ ID NO: 555 - DNA, 20 bp, Artificial Sequence
  Synthetic
ggctttgctcaaccagggag

SEQ ID NO: 556 - DNA, 20 bp, Artificial Sequence
  Synthetic
gagacgccgggaacccgcgt

SEQ ID NO: 557 - DNA, 20 bp, Artificial Sequence
  Synthetic
gccgggaacccgcgttggcg

SEQ ID NO: 558 - DNA, 20 bp, Artificial Sequence
  Synthetic
ggcccgacggagccgtgtgg

SEQ ID NO: 559 - DNA, 20 bp, Artificial Sequence
  Synthetic
gcactcgcggcggaggcaag

SEQ ID NO: 560 - DNA, 20 bp, Artificial Sequence
  Synthetic
gtcggcgctgtcggatactt

SEQ ID NO: 561 - DNA, 20 bp, Artificial Sequence
  Synthetic
gtgccgccaggccggagaac

SEQ ID NO: 562 - DNA, 20 bp, Artificial Sequence
  Synthetic
ggagcctcggcccaacaaaa

SEQ ID NO: 563 - DNA, 20 bp, Artificial Sequence
  Synthetic
gggcgcgggggagcgcagat

SEQ ID NO: 564 - DNA, 20 bp, Artificial Sequence
  Synthetic
gtgcctgggcccagaccgct

SEQ ID NO: 565 - DNA, 20 bp, Artificial Sequence
  Synthetic
gcggcttcctagtgagtcgg

SEQ ID NO: 566 - DNA, 20 bp, Artificial Sequence
  Synthetic
gcttccggctgtaaagatgg

SEQ ID NO: 567 - DNA, 20 bp, Artificial Sequence
  Synthetic
ggctacggtgagccgaaggt

SEQ ID NO: 568 - DNA, 20 bp, Artificial Sequence
  Synthetic
gacaggtccagtgaaggcgc

SEQ ID NO: 569 - DNA, 20 bp, Artificial Sequence
  Synthetic
gcggcggacaggtccagtga

SEQ ID NO: 570 - DNA, 20 bp, Artificial Sequence
  Synthetic
ggcgcctcagctctggtgag

SEQ ID NO: 571 - DNA, 20 bp, Artificial Sequence
  Synthetic
gcggcccgccgtcccagacg

SEQ ID NO: 572 - DNA, 20 bp, Artificial Sequence
  Synthetic
gggaagcctcgggaaaccac

SEQ ID NO: 573 - DNA, 20 bp, Artificial Sequence
  Synthetic
gtaatcggcagccgaggaac

SEQ ID NO: 574 - DNA, 20 bp, Artificial Sequence
  Synthetic
gacttcccaggagctccgag

SEQ ID NO: 575 - DNA, 20 bp, Artificial Sequence
  Synthetic
gccaggagctccgagaggcg

SEQ ID NO: 576 - DNA, 20 bp, Artificial Sequence
  Synthetic
gccgagaggcggggaagtgg

SEQ ID NO: 577 - DNA, 20 bp, Artificial Sequence
  Synthetic
gcggccgccgggacccgaag

SEQ ID NO: 578 - DNA, 20 bp, Artificial Sequence
  Synthetic
ggtcatggagcggaacgcca

SEQ ID NO: 579 - DNA, 20 bp, Artificial Sequence
  Synthetic
gtcctcctcagcagcaccgg

SEQ ID NO: 580 - DNA, 20 bp, Artificial Sequence
  Synthetic
gcgcagggaagatgaattgt

SEQ ID NO: 581 - DNA, 20 bp, Artificial Sequence
  Synthetic
ggcttgcggcgagacatggt

SEQ ID NO: 582 - DNA, 20 bp, Artificial Sequence
  Synthetic
gtgagctgcaagttcaagtg

SEQ ID NO: 583 - DNA, 20 bp, Artificial Sequence
  Synthetic
gaaagaaaccagccagtccg

SEQ ID NO: 584 - DNA, 20 bp, Artificial Sequence
  Synthetic
gcctcctcctctgcccgggt

SEQ ID NO: 585 - DNA, 20 bp, Artificial Sequence
  Synthetic
gctttctttcagggtctggt

SEQ ID NO: 586 - DNA, 20 bp, Artificial Sequence
  Synthetic
gctgtgcgcgagtgagtgag

SEQ ID NO: 587 - DNA, 20 bp, Artificial Sequence
  Synthetic
ggagcgcgagcaggacccgg

SEQ ID NO: 588 - DNA, 20 bp, Artificial Sequence
  Synthetic
gtccccgccggaaccatgtc

SEQ ID NO: 589 - DNA, 20 bp, Artificial Sequence
  Synthetic
gaccgaccggcccgacatgg

SEQ ID NO: 590 - DNA, 20 bp, Artificial Sequence
  Synthetic
gcactgctcccaagacaccg

SEQ ID NO: 591 - DNA, 20 bp, Artificial Sequence
  Synthetic
gtgggactggcgggtcaggt

SEQ ID NO: 592 - DNA, 20 bp, Artificial Sequence
  Synthetic
ggagggcgcggccaactcca

SEQ ID NO: 593 - DNA, 20 bp, Artificial Sequence
  Synthetic
gggccagggacgggacacag

SEQ ID NO: 594 - DNA, 20 bp, Artificial Sequence
  Synthetic
gggcgcggccaactccaggg

SEQ ID NO: 595 - DNA, 20 bp, Artificial Sequence
  Synthetic
gagacgtgctagcgcgtcga

SEQ ID NO: 596 - DNA, 20 bp, Artificial Sequence
  Synthetic
gcgcgtcgaaggtagctcta

SEQ ID NO: 597 - DNA, 20 bp, Artificial Sequence
  Synthetic
gtcgggaaatggccgctgtg

SEQ ID NO: 598 - DNA, 20 bp, Artificial Sequence
  Synthetic
gcacgcagactcctagcgga

SEQ ID NO: 599 - DNA, 20 bp, Artificial Sequence
  Synthetic
gctcgcacgcagactcctag

SEQ ID NO: 600 - DNA, 20 bp, Artificial Sequence
  Synthetic
ggcgcgggaagtttggatcc

SEQ ID NO: 601 - DNA, 20 bp, Artificial Sequence
  Synthetic
gagatcggggcgagacaatg

SEQ ID NO: 602 - DNA, 20 bp, Artificial Sequence
  Synthetic
ggcagagtggaaactgacac

SEQ ID NO: 603 - DNA, 20 bp, Artificial Sequence
  Synthetic
gggcgagacaatggggatgt

SEQ ID NO: 604 - DNA, 20 bp, Artificial Sequence
  Synthetic
gcacagcctgtcccccgtcc

SEQ ID NO: 605 - DNA, 20 bp, Artificial Sequence
  Synthetic
ggaaggcctcctgagcgcag

SEQ ID NO: 606 - DNA, 20 bp, Artificial Sequence
  Synthetic
gtcgctgagacttcctggac

SEQ ID NO: 607 - DNA, 20 bp, Artificial Sequence
  Synthetic
ggacacccgaggcgcagcag

SEQ ID NO: 608 - DNA, 20 bp, Artificial Sequence
  Synthetic
ggaggggacagatttgtgac

SEQ ID NO: 609 - DNA, 20 bp, Artificial Sequence
  Synthetic
gggcgcgagcttctgaaact

SEQ ID NO: 610 - DNA, 20 bp, Artificial Sequence
  Synthetic
gcccgaggcggacgtgagaa

SEQ ID NO: 611 - DNA, 20 bp, Artificial Sequence
  Synthetic
ggagaagggtcgggccaaga

SEQ ID NO: 612 - DNA, 20 bp, Artificial Sequence
  Synthetic
gggaccaagtgggcccgagg

SEQ ID NO: 613 - DNA, 20 bp, Artificial Sequence
  Synthetic
gcccctcctcaccctcgtag

SEQ ID NO: 614 - DNA, 20 bp, Artificial Sequence
  Synthetic
ggatgcccctctcgagaaga

SEQ ID NO: 615 - DNA, 20 bp, Artificial Sequence
  Synthetic
ggggcccgccgcccgcaccc

SEQ ID NO: 616 - DNA, 20 bp, Artificial Sequence
  Synthetic
gccaagatggcgacgggaac

SEQ ID NO: 617 - DNA, 20 bp, Artificial Sequence
  Synthetic
gctcagggttggagacttcg

SEQ ID NO: 618 - DNA, 20 bp, Artificial Sequence
  Synthetic
gtcggggccaagatggcgac

SEQ ID NO: 619 - DNA, 20 bp, Artificial Sequence
  Synthetic
ggccgccgcctcaccctcgt

SEQ ID NO: 620 - DNA, 20 bp, Artificial Sequence
  Synthetic
gtcgtcctacgagggtgagg

SEQ ID NO: 621 - DNA, 20 bp, Artificial Sequence
  Synthetic
gccagcgagctcggcaacct

SEQ ID NO: 622 - DNA, 20 bp, Artificial Sequence
  Synthetic
gacttagtccgatcggtaac

SEQ ID NO: 623 - DNA, 20 bp, Artificial Sequence
  Synthetic
gaggtcggtgcgtctgtcgg

SEQ ID NO: 624 - DNA, 20 bp, Artificial Sequence
  Synthetic
ggactcgcctcctcttccta

SEQ ID NO: 625 - DNA, 20 bp, Artificial Sequence
  Synthetic
gcggagggaagtccacggaa

SEQ ID NO: 626 - DNA, 20 bp, Artificial Sequence
  Synthetic
gggtctggtgggtcgaggaa

SEQ ID NO: 627 - DNA, 20 bp, Artificial Sequence
  Synthetic
gtgaggggtctggtgggtcg

SEQ ID NO: 628 - DNA, 20 bp, Artificial Sequence
  Synthetic
gctgcgcggggtattcgaat

SEQ ID NO: 629 - DNA, 20 bp, Artificial Sequence
  Synthetic
ggaatgtgtcccacccagca

SEQ ID NO: 630 - DNA, 20 bp, Artificial Sequence
  Synthetic
ggcttccccaccccaccaga

SEQ ID NO: 631 - DNA, 20 bp, Artificial Sequence
  Synthetic
gctgtattcgggccttggac

SEQ ID NO: 632 - DNA, 20 bp, Artificial Sequence
  Synthetic
gggttcctgccggctgtatt

SEQ ID NO: 633 - DNA, 20 bp, Artificial Sequence
  Synthetic
gtctctagactgggacggtg

SEQ ID NO: 634 - DNA, 20 bp, Artificial Sequence
  Synthetic
gccatttagccacatgggaa

SEQ ID NO: 635 - DNA, 20 bp, Artificial Sequence
  Synthetic
ggcttgcgctcacttccgcc

SEQ ID NO: 636 - DNA, 20 bp, Artificial Sequence
  Synthetic
gggcggctcaaccccagccg

SEQ ID NO: 637 - DNA, 20 bp, Artificial Sequence
  Synthetic
gcgcgaggctgggttacgtg

SEQ ID NO: 638 - DNA, 20 bp, Artificial Sequence
  Synthetic
ggaatgggttccggcctccg

SEQ ID NO: 639 - DNA, 20 bp, Artificial Sequence
  Synthetic
ggccctgaggtgcctagaat

SEQ ID NO: 640 - DNA, 20 bp, Artificial Sequence
  Synthetic
gccgcgggcgtgtaaacaaa

SEQ ID NO: 641 - DNA, 20 bp, Artificial Sequence
  Synthetic
gggcggtccgggcgggtgac

SEQ ID NO: 642 - DNA, 20 bp, Artificial Sequence
  Synthetic
gggtccgggcgggtgactgg

SEQ ID NO: 643 - DNA, 20 bp, Artificial Sequence
  Synthetic
gccatggagctgccagctgt

SEQ ID NO: 644 - DNA, 20 bp, Artificial Sequence
  Synthetic
ggacaactgagcccgggccg

SEQ ID NO: 645 - DNA, 20 bp, Artificial Sequence
  Synthetic
gtggtcgcccaagtaagtcg

SEQ ID NO: 646 - DNA, 20 bp, Artificial Sequence
  Synthetic
gagggagtattatgggctgt

SEQ ID NO: 647 - DNA, 20 bp, Artificial Sequence
  Synthetic
gcctgcgcccgcggccggtg

SEQ ID NO: 648 - DNA, 20 bp, Artificial Sequence
  Synthetic
gcgggcgcagggagtattat

SEQ ID NO: 649 - DNA, 20 bp, Artificial Sequence
  Synthetic
gcgcgtgcgcgcccggacga

SEQ ID NO: 650 - DNA, 20 bp, Artificial Sequence
  Synthetic
gctgtcagccatcggcgagc

SEQ ID NO: 651 - DNA, 20 bp, Artificial Sequence
  Synthetic
ggacgggagggaccccactg

SEQ ID NO: 652 - DNA, 20 bp, Artificial Sequence
  Synthetic
ggactcgccgcttcccccct

SEQ ID NO: 653 - DNA, 20 bp, Artificial Sequence
  Synthetic
ggggaagcggcgagtcaaca

SEQ ID NO: 654 - DNA, 20 bp, Artificial Sequence
  Synthetic
gtgctcctggaagcggccaa

SEQ ID NO: 655 - DNA, 20 bp, Artificial Sequence
  Synthetic
gctgctctgtaggaggaggg

SEQ ID NO: 656 - DNA, 20 bp, Artificial Sequence
  Synthetic
ggccaatcaccgcggagcaa

SEQ ID NO: 657 - DNA, 20 bp, Artificial Sequence
  Synthetic
gtcgccgagttccaggtgat

SEQ ID NO: 658 - DNA, 20 bp, Artificial Sequence
  Synthetic
gaagataacgacgggaagag

SEQ ID NO: 659 - DNA, 20 bp, Artificial Sequence
  Synthetic
gcacatagaaagataacgac

SEQ ID NO: 660 - DNA, 20 bp, Artificial Sequence
  Synthetic
gtctcagctgggaaggaccg

SEQ ID NO: 661 - DNA, 20 bp, Artificial Sequence
  Synthetic
ggccgccagcgcggtgtagg

SEQ ID NO: 662 - DNA, 20 bp, Artificial Sequence
  Synthetic
ggcggccgccagcgcggtgt

SEQ ID NO: 663 - DNA, 20 bp, Artificial Sequence
  Synthetic
gtccgccgcggacaagaccc

SEQ ID NO: 664 - DNA, 20 bp, Artificial Sequence
  Synthetic
gaagatctcgcggaagccta

SEQ ID NO: 665 - DNA, 20 bp, Artificial Sequence
  Synthetic
ggcttccgcgagatcttcgg

SEQ ID NO: 666 - DNA, 20 bp, Artificial Sequence
  Synthetic
gtccgcgagatcttcggtgg

SEQ ID NO: 667 - DNA, 20 bp, Artificial Sequence
  Synthetic
ggaccctgaacccgaaccat

SEQ ID NO: 668 - DNA, 20 bp, Artificial Sequence
  Synthetic
gtaacccggtacctaacaag

SEQ ID NO: 669 - DNA, 20 bp, Artificial Sequence
  Synthetic
gttaccttaactgccacctc

SEQ ID NO: 670 - DNA, 20 bp, Artificial Sequence
  Synthetic
gaattgagcggagagcgacg

SEQ ID NO: 671 - DNA, 20 bp, Artificial Sequence
  Synthetic
ggacggccgagggcctcgga

SEQ ID NO: 672 - DNA, 20 bp, Artificial Sequence
  Synthetic
gtacccggcttattattccg

SEQ ID NO: 673 - DNA, 20 bp, Artificial Sequence
  Synthetic
gctctctggaaggacgggga

SEQ ID NO: 674 - DNA, 20 bp, Artificial Sequence
  Synthetic
ggcccgactccagccgaaaa

SEQ ID NO: 675 - DNA, 20 bp, Artificial Sequence
  Synthetic
gggcggggatactaaagcga

SEQ ID NO: 676 - DNA, 20 bp, Artificial Sequence
  Synthetic
ggctcctcggaagccatggt

SEQ ID NO: 677 - DNA, 20 bp, Artificial Sequence
  Synthetic
ggggcggcgcggccggatcg

SEQ ID NO: 678 - DNA, 20 bp, Artificial Sequence
  Synthetic
gtctgcactacaccggagag

SEQ ID NO: 679 - DNA, 20 bp, Artificial Sequence
  Synthetic
gacaacaacgggagcaggtc

SEQ ID NO: 680 - DNA, 20 bp, Artificial Sequence
  Synthetic
gccaaacaattgatcatcga

SEQ ID NO: 681 - DNA, 20 bp, Artificial Sequence
  Synthetic
ggttatcattctcccgagat

SEQ ID NO: 682 - DNA, 20 bp, Artificial Sequence
  Synthetic
gacgtcggttgcctaacaac

SEQ ID NO: 683 - DNA, 20 bp, Artificial Sequence
  Synthetic
ggccgagtcagtgtacacgt

SEQ ID NO: 684 - DNA, 20 bp, Artificial Sequence
  Synthetic
gtgtcgcgccccacgcccag

SEQ ID NO: 685 - DNA, 20 bp, Artificial Sequence
  Synthetic
gaaggggtagagaggtgata

SEQ ID NO: 686 - DNA, 20 bp, Artificial Sequence
  Synthetic
ggaggaaaggaagggcagta

SEQ ID NO: 687 - DNA, 20 bp, Artificial Sequence
  Synthetic
gttcagttctttaacatcta

SEQ ID NO: 688 - DNA, 20 bp, Artificial Sequence
  Synthetic
ggcgggagggcgaagagcag

SEQ ID NO: 689 - DNA, 20 bp, Artificial Sequence
  Synthetic
gggcagctcgacctcctctc

SEQ ID NO: 690 - DNA, 20 bp, Artificial Sequence
  Synthetic
gggcgcgggctcccctcagg

SEQ ID NO: 691 - DNA, 20 bp, Artificial Sequence
  Synthetic
gcagggaagccgtacctgga

SEQ ID NO: 692 - DNA, 20 bp, Artificial Sequence
  Synthetic
ggagggacccggacagtcag

SEQ ID NO: 693 - DNA, 20 bp, Artificial Sequence
  Synthetic
ggtccgggtccctccaggta

SEQ ID NO: 694 - DNA, 20 bp, Artificial Sequence
  Synthetic
gactgagggccgagccgagg

SEQ ID NO: 695 - DNA, 20 bp, Artificial Sequence
  Synthetic
gagcgcctggcttcttactg

SEQ ID NO: 696 - DNA, 20 bp, Artificial Sequence
  Synthetic
ggaagccgcagtaagaagcc

SEQ ID NO: 697 - DNA, 20 bp, Artificial Sequence
  Synthetic
gacgacctgggctctcagta

SEQ ID NO: 698 - DNA, 20 bp, Artificial Sequence
  Synthetic
ggcagagcgcgctctctcta

SEQ ID NO: 699 - DNA, 20 bp, Artificial Sequence
  Synthetic
ggttgcgtaaagtgaggcaa

SEQ ID NO: 700 - DNA, 20 bp, Artificial Sequence
  Synthetic
gcaacatggcctcttcgctg

SEQ ID NO: 701 - DNA, 20 bp, Artificial Sequence
  Synthetic
ggagggagtaaagcctagag

SEQ ID NO: 702 - DNA, 20 bp, Artificial Sequence
  Synthetic
gtaaagcctagagaggagac

SEQ ID NO: 703 - DNA, 20 bp, Artificial Sequence
  Synthetic
gaggatggcttcccctctga

SEQ ID NO: 704 - DNA, 20 bp, Artificial Sequence
  Synthetic
ggcttcccctctgagggacg

SEQ ID NO: 705 - DNA, 20 bp, Artificial Sequence
  Synthetic
gtcctcctcgtccctcagag

SEQ ID NO: 706 - DNA, 20 bp, Artificial Sequence
  Synthetic
gccggacccagcgcgacctg

SEQ ID NO: 707 - DNA, 20 bp, Artificial Sequence
  Synthetic
gggtcggctcctctgggcaa

SEQ ID NO: 708 - DNA, 20 bp, Artificial Sequence
  Synthetic
gtccggagacgcctgaggaa

SEQ ID NO: 709 - DNA, 20 bp, Artificial Sequence
  Synthetic
gagccggccgagggtggcgg

SEQ ID NO: 710 - DNA, 20 bp, Artificial Sequence
  Synthetic
gaggcggccgagagaaaggg

SEQ ID NO: 711 - DNA, 20 bp, Artificial Sequence
  Synthetic
gcgcagccggccgagggtgg

SEQ ID NO: 712 - DNA, 20 bp, Artificial Sequence
  Synthetic
gcggtccgccgaggccaggg

SEQ ID NO: 713 - DNA, 20 bp, Artificial Sequence
  Synthetic
gctgctgcaggagccatttt

SEQ ID NO: 714 - DNA, 20 bp, Artificial Sequence
  Synthetic
gtgaatggagccgggatgag

SEQ ID NO: 715 - DNA, 20 bp, Artificial Sequence
  Synthetic
gaagggcggccggtagagta

SEQ ID NO: 716 - DNA, 20 bp, Artificial Sequence
  Synthetic
gaggatatagggagcggtat

SEQ ID NO: 717 - DNA, 20 bp, Artificial Sequence
  Synthetic
gatggggcagaaaacgcctg

SEQ ID NO: 718 - DNA, 20 bp, Artificial Sequence
  Synthetic
ggagagtgtgcggctccagg

SEQ ID NO: 719 - DNA, 20 bp, Artificial Sequence
  Synthetic
gggctccaggtgggctcacg

SEQ ID NO: 720 - DNA, 20 bp, Artificial Sequence
  Synthetic
gtcacgcggtgagtcatatg

SEQ ID NO: 721 - DNA, 20 bp, Artificial Sequence
  Synthetic
gccgcaatgtctcttgacag

SEQ ID NO: 722 - DNA, 20 bp, Artificial Sequence
  Synthetic
gtggagactcccgaccccag

SEQ ID NO: 723 - DNA, 20 bp, Artificial Sequence
  Synthetic
gtgtctcttgacagcggcgg

SEQ ID NO: 724 - DNA, 20 bp, Artificial Sequence
  Synthetic
gaggttcggagcgggagctc

SEQ ID NO: 725 - DNA, 20 bp, Artificial Sequence
  Synthetic
gctcgggctcgcggacggta

SEQ ID NO: 726 - DNA, 20 bp, Artificial Sequence
  Synthetic
ggggctcgcggacggtatgg

SEQ ID NO: 727 - DNA, 20 bp, Artificial Sequence
  Synthetic
gacgtgctcgctcacggcgg

SEQ ID NO: 728 - DNA, 20 bp, Artificial Sequence
  Synthetic
gcggagaccgagctgggatc

SEQ ID NO: 729 - DNA, 20 bp, Artificial Sequence
  Synthetic
gcgtacgtgctcgctcacgg

SEQ ID NO: 730 - DNA, 20 bp, Artificial Sequence
  Synthetic
gccgggcgggcgcctctcac

SEQ ID NO: 731 - DNA, 20 bp, Artificial Sequence
  Synthetic
gcgccgccaaggaagccaac

SEQ ID NO: 732 - DNA, 20 bp, Artificial Sequence
  Synthetic
gtcaccgggagcgctcgcgg

SEQ ID NO: 733 - DNA, 20 bp, Artificial Sequence
  Synthetic
gcctcccctgcgctccacta

SEQ ID NO: 734 - DNA, 20 bp, Artificial Sequence
  Synthetic
ggccgctgctctccggctga

SEQ ID NO: 735 - DNA, 20 bp, Artificial Sequence
  Synthetic
ggggtcagcggggtctaccc

SEQ ID NO: 736 - DNA, 20 bp, Artificial Sequence
  Synthetic
gcgggtccgcgacaagatgg

SEQ ID NO: 737 - DNA, 20 bp, Artificial Sequence
  Synthetic
ggcttcgagcgcgatctact

SEQ ID NO: 738 - DNA, 20 bp, Artificial Sequence
  Synthetic
gtcgcgctcgaagccccggt

SEQ ID NO: 739 - DNA, 20 bp, Artificial Sequence
  Synthetic
ggagtcttgcctgtcagcag

SEQ ID NO: 740 - DNA, 20 bp, Artificial Sequence
  Synthetic
gtagtttgccccgtccaaag

SEQ ID NO: 741 - DNA, 20 bp, Artificial Sequence
  Synthetic
gttgcagcctcgctacgggg

SEQ ID NO: 742 - DNA, 20 bp, Artificial Sequence
  Synthetic
gctgccactcggcaccccaa

SEQ ID NO: 743 - DNA, 20 bp, Artificial Sequence
  Synthetic
ggggcggtgagggtccttga

SEQ ID NO: 744 - DNA, 20 bp, Artificial Sequence
  Synthetic
ggttcccgccaagaccctaa

SEQ ID NO: 745 - DNA, 20 bp, Artificial Sequence
  Synthetic
gacagggccagagaccctaa

SEQ ID NO: 746 - DNA, 20 bp, Artificial Sequence
  Synthetic
gcccgctggagcccaaatcg

SEQ ID NO: 747 - DNA, 20 bp, Artificial Sequence
  Synthetic
ggctggagcccaaatcgcgg

SEQ ID NO: 748 - DNA, 20 bp, Artificial Sequence
  Synthetic
gcgccgccgatcccagagtc

SEQ ID NO: 749 - DNA, 20 bp, Artificial Sequence
  Synthetic
gggaagtggcggcgcggtca

SEQ ID NO: 750 - DNA, 20 bp, Artificial Sequence
  Synthetic
ggggtcccggactctgggat

SEQ ID NO: 751 - DNA, 20 bp, Artificial Sequence
  Synthetic
ggccggggcgcggggcatca

SEQ ID NO: 752 - DNA, 20 bp, Artificial Sequence
  Synthetic
gggcctgcaacgtgtctctg

SEQ ID NO: 753 - DNA, 20 bp, Artificial Sequence
  Synthetic
ggtcgcgctcgagtcccgac

SEQ ID NO: 754 - DNA, 20 bp, Artificial Sequence
  Synthetic
ggaaaagtcctcaatacggt

SEQ ID NO: 755 - DNA, 20 bp, Artificial Sequence
  Synthetic
ggaacgaaaagtcctcaata

SEQ ID NO: 756 - DNA, 20 bp, Artificial Sequence
  Synthetic
gttgggctcaacattgagac

SEQ ID NO: 757 - DNA, 20 bp, Artificial Sequence
  Synthetic
gcttcacacggaggacgcga

SEQ ID NO: 758 - DNA, 20 bp, Artificial Sequence
  Synthetic
ggaggattgagaggcctctg

SEQ ID NO: 759 - DNA, 20 bp, Artificial Sequence
  Synthetic
gtctatgcgaagatcatgga

SEQ ID NO: 760 - DNA, 20 bp, Artificial Sequence
  Synthetic
gaggcgaagccgcggaggac

SEQ ID NO: 761 - DNA, 20 bp, Artificial Sequence
  Synthetic
gcgagcaggcgaagccgcgg

SEQ ID NO: 762 - DNA, 20 bp, Artificial Sequence
  Synthetic
ggagcgagcaggcgaagccg

SEQ ID NO: 763 - DNA, 20 bp, Artificial Sequence
  Synthetic
gacgccactgagttagaaac

SEQ ID NO: 764 - DNA, 20 bp, Artificial Sequence
  Synthetic
gccactgagttagaaactgg

SEQ ID NO: 765 - DNA, 20 bp, Artificial Sequence
  Synthetic
ggcagcagcgagaatctaca

SEQ ID NO: 766 - DNA, 20 bp, Artificial Sequence
  Synthetic
gatctgcctagctcccacta

SEQ ID NO: 767 - DNA, 20 bp, Artificial Sequence
  Synthetic
gccctctcacgggagaactg

SEQ ID NO: 768 - DNA, 20 bp, Artificial Sequence
  Synthetic
gtcccgtgagagggccttcg

SEQ ID NO: 769 - DNA, 20 bp, Artificial Sequence
  Synthetic
gaagctgcactactagagac

SEQ ID NO: 770 - DNA, 20 bp, Artificial Sequence
  Synthetic
gagaccggtagaaatgaatg

SEQ ID NO: 771 - DNA, 20 bp, Artificial Sequence
  Synthetic
gtgacggcgaagccttgcgg

SEQ ID NO: 772 - DNA, 20 bp, Artificial Sequence
  Synthetic
gcgtagctagctgcaagcag

SEQ ID NO: 773 - DNA, 20 bp, Artificial Sequence
  Synthetic
ggctagctgcaagcagaggc

SEQ ID NO: 774 - DNA, 20 bp, Artificial Sequence
  Synthetic
gtagtgaggcacagcctgcg

SEQ ID NO: 775 - DNA, 20 bp, Artificial Sequence
  Synthetic
gaccgtgtgggctgtagtag

SEQ ID NO: 776 - DNA, 20 bp, Artificial Sequence
  Synthetic
gggttccggccgcaccgtgt

SEQ ID NO: 777 - DNA, 20 bp, Artificial Sequence
  Synthetic
gtgtgggctgtagtagcggg

SEQ ID NO: 778 - DNA, 20 bp, Artificial Sequence
  Synthetic
gagcggttgctggttctgac

SEQ ID NO: 779 - DNA, 20 bp, Artificial Sequence
  Synthetic
ggcccggacgccatttccag

SEQ ID NO: 780 - DNA, 20 bp, Artificial Sequence
  Synthetic
gggcatcccgggcacctgaa

SEQ ID NO: 781 - DNA, 20 bp, Artificial Sequence
  Synthetic
gcgctcagagctactccggc

SEQ ID NO: 782 - DNA, 20 bp, Artificial Sequence
  Synthetic
ggcgggagccttaatcgggt

SEQ ID NO: 783 - DNA, 20 bp, Artificial Sequence
  Synthetic
ggctctgagcgccggctgtg

SEQ ID NO: 784 - DNA, 20 bp, Artificial Sequence
  Synthetic
gaaacgcacagcaactcgca

SEQ ID NO: 785 - DNA, 20 bp, Artificial Sequence
  Synthetic
gagaaggccagagtcacaca

SEQ ID NO: 786 - DNA, 20 bp, Artificial Sequence
  Synthetic
gggcgaaatggctccgaccg

SEQ ID NO: 787 - DNA, 20 bp, Artificial Sequence
  Synthetic
gatggagtaacctgacagcg

SEQ ID NO: 788 - DNA, 20 bp, Artificial Sequence
  Synthetic
gcaactgcggcccaacgcca

SEQ ID NO: 789 - DNA, 20 bp, Artificial Sequence
  Synthetic
gtaacctgacagcggggacg

SEQ ID NO: 790 - DNA, 20 bp, Artificial Sequence
  Synthetic
gcagctgccggacccaggtg

SEQ ID NO: 791 - DNA, 20 bp, Artificial Sequence
  Synthetic
gcgcggctttgcggggacgg

SEQ ID NO: 792 - DNA, 20 bp, Artificial Sequence
  Synthetic
ggggagccaccggaggtcaa

SEQ ID NO: 793 - DNA, 20 bp, Artificial Sequence
  Synthetic
gcgtttggcgccaaaccctg

SEQ ID NO: 794 - DNA, 20 bp, Artificial Sequence
  Synthetic
gctaactcgggcctagaaca

SEQ ID NO: 795 - DNA, 20 bp, Artificial Sequence
  Synthetic
ggctgacaggattctaactc

SEQ ID NO: 796 - DNA, 20 bp, Artificial Sequence
  Synthetic
gcccgggcccggtcagtctg

SEQ ID NO: 797 - DNA, 20 bp, Artificial Sequence
  Synthetic
gggagctgtgagcggagagg

SEQ ID NO: 798 - DNA, 20 bp, Artificial Sequence
  Synthetic
ggggcccggtcagtctgagg

SEQ ID NO: 799 - DNA, 20 bp, Artificial Sequence
  Synthetic
ggtacgcgccggcatctcgg

SEQ ID NO: 800 - DNA, 20 bp, Artificial Sequence
  Synthetic
gtcggaggcttcagcagacg

SEQ ID NO: 801 - DNA, 20 bp, Artificial Sequence
  Synthetic
gtggccgggacggccagtgt

SEQ ID NO: 802 - DNA, 20 bp, Artificial Sequence
  Synthetic
gcactcctcgagggctccag

SEQ ID NO: 803 - DNA, 20 bp, Artificial Sequence
  Synthetic
gccaaggccccactcctcga

SEQ ID NO: 804 - DNA, 20 bp, Artificial Sequence
  Synthetic
gccccgctggagggcctggt

SEQ ID NO: 805 - DNA, 20 bp, Artificial Sequence
  Synthetic
gcagccctcgaagcagctgg

SEQ ID NO: 806 - DNA, 20 bp, Artificial Sequence
  Synthetic
gccactcccgctgccccgtc

SEQ ID NO: 807 - DNA, 20 bp, Artificial Sequence
  Synthetic
ggccggtcccgtccgtcggg

SEQ ID NO: 808 - DNA, 20 bp, Artificial Sequence
  Synthetic
ggcaccccggagatcagagg

SEQ ID NO: 809 - DNA, 20 bp, Artificial Sequence
  Synthetic
gggatagcctccaggattgg

SEQ ID NO: 810 - DNA, 20 bp, Artificial Sequence
  Synthetic
gtccgcaccccggagatcag

SEQ ID NO: 811 - DNA, 20 bp, Artificial Sequence
  Synthetic
gacgctcgtggtggatccat

SEQ ID NO: 812 - DNA, 20 bp, Artificial Sequence
  Synthetic
gcaccagatgggccagccag

SEQ ID NO: 813 - DNA, 20 bp, Artificial Sequence
  Synthetic
gttcttccgagggctcaagt

SEQ ID NO: 814 - DNA, 20 bp, Artificial Sequence
  Synthetic
gcatgttgcgactcctggtg

SEQ ID NO: 815 - DNA, 20 bp, Artificial Sequence
  Synthetic
gctgcgcgctgcggactgtg

SEQ ID NO: 816 - DNA, 20 bp, Artificial Sequence
  Synthetic
ggcttctcggcccgaggcag

SEQ ID NO: 817 - DNA, 20 bp, Artificial Sequence
  Synthetic
gcaggatggcagtagtttag

SEQ ID NO: 818 - DNA, 20 bp, Artificial Sequence
  Synthetic
gcagtacctgacaataatca

SEQ ID NO: 819 - DNA, 20 bp, Artificial Sequence
  Synthetic
gggtcacaggaaactcgccc

SEQ ID NO: 820 - DNA, 20 bp, Artificial Sequence
  Synthetic
gaaagccaggctactaccgc

SEQ ID NO: 821 - DNA, 20 bp, Artificial Sequence
  Synthetic
gaccgcaggtaccaagacag

SEQ ID NO: 822 - DNA, 20 bp, Artificial Sequence
  Synthetic
gctccggaacaggaaaccga

SEQ ID NO: 823 - DNA, 20 bp, Artificial Sequence
  Synthetic
gaacagggcttgacagcgcg

SEQ ID NO: 824 - DNA, 20 bp, Artificial Sequence
  Synthetic
ggacaaaccgcggggtgacc

SEQ ID NO: 825 - DNA, 20 bp, Artificial Sequence
  Synthetic
gttacagtggcgggagttgg

SEQ ID NO: 826 - DNA, 20 bp, Artificial Sequence
  Synthetic
gaggagaccaccgggggaag

SEQ ID NO: 827 - DNA, 20 bp, Artificial Sequence
  Synthetic
gaggcgagcgaggagaccac

SEQ ID NO: 828 - DNA, 20 bp, Artificial Sequence
  Synthetic
gcgagcgaggagaccaccgg

SEQ ID NO: 829 - DNA, 20 bp, Artificial Sequence
  Synthetic
gcggcccgggtgacaggcgg

SEQ ID NO: 830 - DNA, 20 bp, Artificial Sequence
  Synthetic
ggccgctgcctgcaaagtcc

SEQ ID NO: 831 - DNA, 20 bp, Artificial Sequence
  Synthetic
gtggcggcaggcctcggcga

SEQ ID NO: 832 - DNA, 20 bp, Artificial Sequence
  Synthetic
gctgaaacgtctttggaagg

SEQ ID NO: 833 - DNA, 20 bp, Artificial Sequence
  Synthetic
ggcagcgggtcggagatcga

SEQ ID NO: 834 - DNA, 20 bp, Artificial Sequence
  Synthetic
ggtctttggaaggaggaagg

SEQ ID NO: 835 - DNA, 20 bp, Artificial Sequence
  Synthetic
gatctctggtggctctgcta

SEQ ID NO: 836 - DNA, 20 bp, Artificial Sequence
  Synthetic
gctacggcggcgcagaaatg

SEQ ID NO: 837 - DNA, 20 bp, Artificial Sequence
  Synthetic
gtctggtggctctgctacgg

SEQ ID NO: 838 - DNA, 20 bp, Artificial Sequence
  Synthetic
gccaccaagattctgcagag

SEQ ID NO: 839 - DNA, 20 bp, Artificial Sequence
  Synthetic
ggagtggcgggagaagttgc

SEQ ID NO: 840 - DNA, 20 bp, Artificial Sequence
  Synthetic
gtgcgtggcagttgaaagag

SEQ ID NO: 841 - DNA, 20 bp, Artificial Sequence
  Synthetic
gagcgaggaagaggtcggtc

SEQ ID NO: 842 - DNA, 20 bp, Artificial Sequence
  Synthetic
gccggaagcgaggaagaggt

SEQ ID NO: 843 - DNA, 20 bp, Artificial Sequence
  Synthetic
ggcgcgggttggacccggga

SEQ ID NO: 844 - DNA, 20 bp, Artificial Sequence
  Synthetic
gctagggactgtggcctcgg

SEQ ID NO: 845 - DNA, 20 bp, Artificial Sequence
  Synthetic
ggagaaccgcgcccaccccg

SEQ ID NO: 846 - DNA, 20 bp, Artificial Sequence
  Synthetic
ggcggaagcggagggatctc

SEQ ID NO: 847 - DNA, 20 bp, Artificial Sequence
  Synthetic
gagagagagcgggcgagagt

SEQ ID NO: 848 - DNA, 20 bp, Artificial Sequence
  Synthetic
gctaccgctagcctgtaagg

SEQ ID NO: 849 - DNA, 20 bp, Artificial Sequence
  Synthetic
gctagcctgtaaggaggatt

SEQ ID NO: 850 - DNA, 20 bp, Artificial Sequence
  Synthetic
gacggcagcgtccagggtcc

SEQ ID NO: 851 - DNA, 20 bp, Artificial Sequence
  Synthetic
gcgctccggccgcgtcagga

SEQ ID NO: 852 - DNA, 20 bp, Artificial Sequence
  Synthetic
gtgaggcccagggtaagtga

SEQ ID NO: 853 - DNA, 20 bp, Artificial Sequence
  Synthetic
gcgcgatgcagtgtggggaa

SEQ ID NO: 854 - DNA, 20 bp, Artificial Sequence
  Synthetic
gcgctgcgcgatgcagtgtg

SEQ ID NO: 855 - DNA, 20 bp, Artificial Sequence
  Synthetic
gtaacaccagccgggagggt

SEQ ID NO: 856 - DNA, 20 bp, Artificial Sequence
  Synthetic
gaaagactgcagagggatcg

SEQ ID NO: 857 - DNA, 20 bp, Artificial Sequence
  Synthetic
ggactgcagagggatcgagg

SEQ ID NO: 858 - DNA, 20 bp, Artificial Sequence
  Synthetic
ggtccagatgctagcctcgg

SEQ ID NO: 859 - DNA, 20 bp, Artificial Sequence
  Synthetic
gcggcgccatgaagtgagaa

SEQ ID NO: 860 - DNA, 20 bp, Artificial Sequence
  Synthetic
ggggagcagcagtgatagcg

SEQ ID NO: 861 - DNA, 20 bp, Artificial Sequence
  Synthetic
gggtcgtcgagcccagagaa

SEQ ID NO: 862 - DNA, 20 bp, Artificial Sequence
  Synthetic
gcccaaaggcctgtcccaac

SEQ ID NO: 863 - DNA, 20 bp, Artificial Sequence
  Synthetic
gcgctcccacaggcccgccg

SEQ ID NO: 864 - DNA, 20 bp, Artificial Sequence
  Synthetic
ggtggacaacagggagcttc

SEQ ID NO: 865 - DNA, 20 bp, Artificial Sequence
  Synthetic
ggtcagggcagccggctcga

SEQ ID NO: 866 - DNA, 20 bp, Artificial Sequence
  Synthetic
ggtcgctcgtactccagcag

SEQ ID NO: 867 - DNA, 20 bp, Artificial Sequence
  Synthetic
gtactccagcagcggcgcca

SEQ ID NO: 868 - DNA, 20 bp, Artificial Sequence
  Synthetic
ggacagatcacagtagtggg

SEQ ID NO: 869 - DNA, 20 bp, Artificial Sequence
  Synthetic
ggggaggcggtgtggttggt

SEQ ID NO: 870 - DNA, 20 bp, Artificial Sequence
  Synthetic
gtagtgggaggcggtgtggt

SEQ ID NO: 871 - DNA, 20 bp, Artificial Sequence
  Synthetic
gagtgggggacggcactaat

SEQ ID NO: 872 - DNA, 20 bp, Artificial Sequence
  Synthetic
gggacgcagccgcctcatgg

SEQ ID NO: 873 - DNA, 20 bp, Artificial Sequence
  Synthetic
ggtcccccactggaaaaccg

SEQ ID NO: 874 - DNA, 20 bp, Artificial Sequence
  Synthetic
gcccgtcgagctgggttcca

SEQ ID NO: 875 - DNA, 20 bp, Artificial Sequence
  Synthetic
ggtcgagctgggttccaagg

SEQ ID NO: 876 - DNA, 20 bp, Artificial Sequence
  Synthetic
gtgggttccaaggcggctgg

SEQ ID NO: 877 - DNA, 20 bp, Artificial Sequence
  Synthetic
ggagcttggagcttagagtt

SEQ ID NO: 878 - DNA, 20 bp, Artificial Sequence
  Synthetic
ggaggcatcccgaaggtttc

SEQ ID NO: 879 - DNA, 20 bp, Artificial Sequence
  Synthetic
ggttagctagacccgcccag

SEQ ID NO: 880 - DNA, 20 bp, Artificial Sequence
  Synthetic
gccgcccctgagctctgtca

SEQ ID NO: 881 - DNA, 20 bp, Artificial Sequence
  Synthetic
ggcatatcgtgtcctcacac

SEQ ID NO: 882 - DNA, 20 bp, Artificial Sequence
  Synthetic
ggtgaggacacgatatgctg

SEQ ID NO: 883 - DNA, 20 bp, Artificial Sequence
  Synthetic
gagggtcagactagcgccag

SEQ ID NO: 884 - DNA, 20 bp, Artificial Sequence
  Synthetic
gcctccgccaggcaaaagga

SEQ ID NO: 885 - DNA, 20 bp, Artificial Sequence
  Synthetic
gggtacgcgagcgtccctga

SEQ ID NO: 886 - DNA, 20 bp, Artificial Sequence
  Synthetic
ggactgccccgggccgctga

SEQ ID NO: 887 - DNA, 20 bp, Artificial Sequence
  Synthetic
ggtcctgtacctaggaaaga

SEQ ID NO: 888 - DNA, 20 bp, Artificial Sequence
  Synthetic
gtcctggagggagtgtcggg

SEQ ID NO: 889 - DNA, 20 bp, Artificial Sequence
  Synthetic
gcgtccacgggtgagtatgg

SEQ ID NO: 890 - DNA, 20 bp, Artificial Sequence
  Synthetic
ggttccaccatactcacccg

SEQ ID NO: 891 - DNA, 20 bp, Artificial Sequence
  Synthetic
gtggcgtccacgggtgagta

SEQ ID NO: 892 - DNA, 20 bp, Artificial Sequence
  Synthetic
gggaacccgcgcaaattgaa

SEQ ID NO: 893 - DNA, 20 bp, Artificial Sequence
  Synthetic
gggccggcaacgcagaacac

SEQ ID NO: 894 - DNA, 20 bp, Artificial Sequence
  Synthetic
gtggccagagcacccacggc

SEQ ID NO: 895 - DNA, 20 bp, Artificial Sequence
  Synthetic
gacccgcggctcgggatgga

SEQ ID NO: 896 - DNA, 20 bp, Artificial Sequence
  Synthetic
gcgggacccgcggctcggga

SEQ ID NO: 897 - DNA, 20 bp, Artificial Sequence
  Synthetic
ggtcctagcagcgggacccg

SEQ ID NO: 898 - DNA, 20 bp, Artificial Sequence
  Synthetic
gccggaccgagcgccaaacg

SEQ ID NO: 899 - DNA, 20 bp, Artificial Sequence
  Synthetic
ggccccgctcggcgataccc

SEQ ID NO: 900 - DNA, 20 bp, Artificial Sequence
  Synthetic
ggtcgcgtccgacacccggt

SEQ ID NO: 901 - DNA, 20 bp, Artificial Sequence
  Synthetic
gatggagggggagagtacgt

SEQ ID NO: 902 - DNA, 20 bp, Artificial Sequence
  Synthetic
gcctcttgtgtagcctgagg

SEQ ID NO: 903 - DNA, 20 bp, Artificial Sequence
  Synthetic
ggaggcggcggtagcatgga

SEQ ID NO: 904 - DNA, 20 bp, Artificial Sequence
  Synthetic
gacagggcaccgagggaagg

SEQ ID NO: 905 - DNA, 20 bp, Artificial Sequence
  Synthetic
gcgagggaaggaggacgcga

SEQ ID NO: 906 - DNA, 20 bp, Artificial Sequence
  Synthetic
ggtgacagggcaccgaggga

SEQ ID NO: 907 - DNA, 20 bp, Artificial Sequence
  Synthetic
gaaggccatgtccgactcgt

SEQ ID NO: 908 - DNA, 20 bp, Artificial Sequence
  Synthetic
ggagttcgggacccacgagt

SEQ ID NO: 909 - DNA, 20 bp, Artificial Sequence
  Synthetic
ggggacccacgagtcggaca

SEQ ID NO: 910 - DNA, 20 bp, Artificial Sequence
  Synthetic
gcaacgcagcggcaacatac

SEQ ID NO: 911 - DNA, 20 bp, Artificial Sequence
  Synthetic
gcggaggccccacgtcgata

SEQ ID NO: 912 - DNA, 20 bp, Artificial Sequence
  Synthetic
ggcgtcgaacgcagaggagg

SEQ ID NO: 913 - DNA, 20 bp, Artificial Sequence
  Synthetic
ggagggcgaccggctcaaag

SEQ ID NO: 914 - DNA, 20 bp, Artificial Sequence
  Synthetic
gggtctggccgacacgtcag

SEQ ID NO: 915 - DNA, 20 bp, Artificial Sequence
  Synthetic
gtcccgcggtcgcccggcag

SEQ ID NO: 916 - DNA, 20 bp, Artificial Sequence
  Synthetic
gcgggaaagtcgaaaactac

SEQ ID NO: 917 - DNA, 20 bp, Artificial Sequence
  Synthetic
gcggtgagtaagtggagcaa

SEQ ID NO: 918 - DNA, 20 bp, Artificial Sequence
  Synthetic
ggaaagtcgaaaactacggg

SEQ ID NO: 919 - DNA, 20 bp, Artificial Sequence
  Synthetic
ggaacggctgcggcttcggg

SEQ ID NO: 920 - DNA, 20 bp, Artificial Sequence
  Synthetic
ggacagcgcgggaacggctg

SEQ ID NO: 921 - DNA, 20 bp, Artificial Sequence
  Synthetic
gttgggagaccggagaaacc

SEQ ID NO: 922 - DNA, 20 bp, Artificial Sequence
  Synthetic
gctgcagaagggattccatg

SEQ ID NO: 923 - DNA, 20 bp, Artificial Sequence
  Synthetic
ggcggctgcacaaccagtgg

SEQ ID NO: 924 - DNA, 20 bp, Artificial Sequence
  Synthetic
ggggtcccaggtgctgacgt

SEQ ID NO: 925 - DNA, 20 bp, Artificial Sequence
  Synthetic
gcgcagacccggccaaccag

SEQ ID NO: 926 - DNA, 20 bp, Artificial Sequence
  Synthetic
ggcccgctcggctctcgcgg

SEQ ID NO: 927 - DNA, 20 bp, Artificial Sequence
  Synthetic
gtctcaacctcgcctctggt

SEQ ID NO: 928 - DNA, 20 bp, Artificial Sequence
  Synthetic
gagccgctctgcagtcacct

SEQ ID NO: 929 - DNA, 20 bp, Artificial Sequence
  Synthetic
ggaaccgcgaaagctgaggc

SEQ ID NO: 930 - DNA, 20 bp, Artificial Sequence
  Synthetic
ggtggcggcgttgggttgag

SEQ ID NO: 931 - DNA, 20 bp, Artificial Sequence
  Synthetic
gaccgccatggctcgaagtc

SEQ ID NO: 932 - DNA, 20 bp, Artificial Sequence
  Synthetic
gcttcgagccatggcggtga

SEQ ID NO: 933 - DNA, 20 bp, Artificial Sequence
  Synthetic
gtccggacttcgagccatgg

SEQ ID NO: 934 - DNA, 20 bp, Artificial Sequence
  Synthetic
gatggggatcggaaccgtag

SEQ ID NO: 935 - DNA, 20 bp, Artificial Sequence
  Synthetic
ggaaggaaaccgatggggat

SEQ ID NO: 936 - DNA, 20 bp, Artificial Sequence
  Synthetic
gtggttgtcggcctaatgag

SEQ ID NO: 937 - DNA, 20 bp, Artificial Sequence
  Synthetic
gagctcgcggaggaagtcgg

SEQ ID NO: 938 - DNA, 20 bp, Artificial Sequence
  Synthetic
gcggcagcgagctcctcctc

SEQ ID NO: 939 - DNA, 20 bp, Artificial Sequence
  Synthetic
gctcgctgccgggggacgct

SEQ ID NO: 940 - DNA, 20 bp, Artificial Sequence
  Synthetic
gagagccccgcacagagcga

SEQ ID NO: 941 - DNA, 20 bp, Artificial Sequence
  Synthetic
gcgcctcactccagagagag

SEQ ID NO: 942 - DNA, 20 bp, Artificial Sequence
  Synthetic
ggtgagagcgaaggtctcgg

SEQ ID NO: 943 - DNA, 20 bp, Artificial Sequence
  Synthetic
gcggcagctgcggaaggctc

SEQ ID NO: 944 - DNA, 20 bp, Artificial Sequence
  Synthetic
ggccgcggcgccgagaaagt

SEQ ID NO: 945 - DNA, 20 bp, Artificial Sequence
  Synthetic
ggtccagggccacttctccc

SEQ ID NO: 946 - DNA, 20 bp, Artificial Sequence
  Synthetic
gatctacctggcttgaggaa

SEQ ID NO: 947 - DNA, 20 bp, Artificial Sequence
  Synthetic
ggcaaaagacgacgaactgg

SEQ ID NO: 948 - DNA, 20 bp, Artificial Sequence
  Synthetic
ggcagcaaaagacgacgaac

SEQ ID NO: 949 - DNA, 20 bp, Artificial Sequence
  Synthetic
gcgggagcgcgggctttgga

SEQ ID NO: 950 - DNA, 20 bp, Artificial Sequence
  Synthetic
ggagaagggagagcgagctt

SEQ ID NO: 951 - DNA, 20 bp, Artificial Sequence
  Synthetic
ggagcgcgggctttggaagg

SEQ ID NO: 952 - DNA, 20 bp, Artificial Sequence
  Synthetic
gaggaagagtggctctatgg

SEQ ID NO: 953 - DNA, 20 bp, Artificial Sequence
  Synthetic
gcgagactccaatcccagga

SEQ ID NO: 954 - DNA, 20 bp, Artificial Sequence
  Synthetic
ggtcctgtccggcctgactt

SEQ ID NO: 955 - DNA, 20 bp, Artificial Sequence
  Synthetic
gaagcaaagactagctcccc

SEQ ID NO: 956 - DNA, 20 bp, Artificial Sequence
  Synthetic
gatcagtgggaggacccggg

SEQ ID NO: 957 - DNA, 20 bp, Artificial Sequence
  Synthetic
ggggctcaaccgccaggccc

SEQ ID NO: 958 - DNA, 20 bp, Artificial Sequence
  Synthetic
gaagaggatttggagggtac

SEQ ID NO: 959 - DNA, 20 bp, Artificial Sequence
  Synthetic
ggcccccgaaagccatgcgc

SEQ ID NO: 960 - DNA, 20 bp, Artificial Sequence
  Synthetic
ggcggaaggccaggaagaaa

SEQ ID NO: 961 - DNA, 20 bp, Artificial Sequence
  Synthetic
gaccgaagaatgcaggcggg

SEQ ID NO: 962 - DNA, 20 bp, Artificial Sequence
  Synthetic
gcccctagtaacagaggcgg

SEQ ID NO: 963 - DNA, 20 bp, Artificial Sequence
  Synthetic
gcgagaccccctagtaacag

SEQ ID NO: 964 - DNA, 20 bp, Artificial Sequence
  Synthetic
gagaggtggggcaggccgtc

SEQ ID NO: 965 - DNA, 20 bp, Artificial Sequence
  Synthetic
gggccgtctggctagctagg

SEQ ID NO: 966 - DNA, 20 bp, Artificial Sequence
  Synthetic
gtctgtgaggcgcagaggtg

SEQ ID NO: 967 - DNA, 20 bp, Artificial Sequence
  Synthetic
gagacggtgaggaccctgca

SEQ ID NO: 968 - DNA, 20 bp, Artificial Sequence
  Synthetic
ggaccgagacagccgagccc

SEQ ID NO: 969 - DNA, 20 bp, Artificial Sequence
  Synthetic
ggtcgaagtcccgccctgca

SEQ ID NO: 970 - DNA, 20 bp, Artificial Sequence
  Synthetic
gagactcggggtgcgcgagg

SEQ ID NO: 971 - DNA, 20 bp, Artificial Sequence
  Synthetic
ggaggatcgacagagtggtg

SEQ ID NO: 972 - DNA, 20 bp, Artificial Sequence
  Synthetic
ggcgaggaggatcgacagag

SEQ ID NO: 973 - DNA, 20 bp, Artificial Sequence
  Synthetic
gatctgtgggccgaggtgtg

SEQ ID NO: 974 - DNA, 20 bp, Artificial Sequence
  Synthetic
gggacgctcgccacacacct

SEQ ID NO: 975 - DNA, 20 bp, Artificial Sequence
  Synthetic
gtgtgtggcgagcgtccgag

SEQ ID NO: 976 - DNA, 20 bp, Artificial Sequence
  Synthetic
gccgccgagtcaccatgagg

SEQ ID NO: 977 - DNA, 20 bp, Artificial Sequence
  Synthetic
ggggagaaaaccgccgcgga

SEQ ID NO: 978 - DNA, 20 bp, Artificial Sequence
  Synthetic
gtgaggggagaaaaccgccg

SEQ ID NO: 979 - DNA, 20 bp, Artificial Sequence
  Synthetic
gacatgctagcgaggtagac

SEQ ID NO: 980 - DNA, 20 bp, Artificial Sequence
  Synthetic
gcgggccgcggcaagactgg

SEQ ID NO: 981 - DNA, 20 bp, Artificial Sequence
  Synthetic
ggtagaccggtgaagcacga

SEQ ID NO: 982 - DNA, 20 bp, Artificial Sequence
  Synthetic
gaatccgagttcccggatga

SEQ ID NO: 983 - DNA, 20 bp, Artificial Sequence
  Synthetic
ggcgggtggcagccattggt

SEQ ID NO: 984 - DNA, 20 bp, Artificial Sequence
  Synthetic
gggtggtgggatctcaccgt

SEQ ID NO: 985 - DNA, 20 bp, Artificial Sequence
  Synthetic
ggcgcggaccgccgccaaca

SEQ ID NO: 986 - DNA, 20 bp, Artificial Sequence
  Synthetic
gggtgatcgtagctcggaaa

SEQ ID NO: 987 - DNA, 20 bp, Artificial Sequence
  Synthetic
gtccgagctacgatcacccg

SEQ ID NO: 988 - DNA, 20 bp, Artificial Sequence
  Synthetic
gaccgactgacggtagggac

SEQ ID NO: 989 - DNA, 20 bp, Artificial Sequence
  Synthetic
gggacggaccgactgacggt

SEQ ID NO: 990 - DNA, 20 bp, Artificial Sequence
  Synthetic
gggacgggaggcgagcaaga

SEQ ID NO: 991 - DNA, 20 bp, Artificial Sequence
  Synthetic
ggctcggtaccacccggcag

SEQ ID NO: 992 - DNA, 20 bp, Artificial Sequence
  Synthetic
gggcctccacgggggaggaa

SEQ ID NO: 993 - DNA, 20 bp, Artificial Sequence
  Synthetic
gtggccccctcctcgcgagt

SEQ ID NO: 994 - DNA, 20 bp, Artificial Sequence
  Synthetic
ggaccccaagttagctctca

SEQ ID NO: 995 - DNA, 20 bp, Artificial Sequence
  Synthetic
ggagccctgagagctaactt

SEQ ID NO: 996 - DNA, 20 bp, Artificial Sequence
  Synthetic
ggctcgtgcccggagatgag

SEQ ID NO: 997 - DNA, 20 bp, Artificial Sequence
  Synthetic
gcagacatggcggacggcag

SEQ ID NO: 998 - DNA, 20 bp, Artificial Sequence
  Synthetic
gcgcgccggtcgcccagaca

SEQ ID NO: 999 - DNA, 20 bp, Artificial Sequence
  Synthetic
gtccctccggaagaccccgg

SEQ ID NO: 1000 - DNA, 20 bp, Artificial Sequence
  Synthetic
gaggagcggcgcaggggatg

SEQ ID NO: 1001 - DNA, 20 bp, Artificial Sequence
  Synthetic
gcgggcaacgccggaagtca

SEQ ID NO: 1002 - DNA, 20 bp, Artificial Sequence
  Synthetic
ggcccgggagccgcctgagg

SEQ ID NO: 1003 - DNA, 20 bp, Artificial Sequence
  Synthetic
gcgacgtctgactggactcg

SEQ ID NO: 1004 - DNA, 20 bp, Artificial Sequence
  Synthetic
ggacggcgtcgacgtctgac

SEQ ID NO: 1005 - DNA, 20 bp, Artificial Sequence
  Synthetic
gtcaggagcgcacgactgaa

SEQ ID NO: 1006 - DNA, 20 bp, Artificial Sequence
  Synthetic
gcagccagcgcggctcctat

SEQ ID NO: 1007 - DNA, 20 bp, Artificial Sequence
  Synthetic
gccgtgcgcagttcccccca

SEQ ID NO: 1008 - DNA, 20 bp, Artificial Sequence
  Synthetic
gtagccaataggagccgcgc

SEQ ID NO: 1009 - DNA, 20 bp, Artificial Sequence
  Synthetic
gaccacgctcgcgcggacca

SEQ ID NO: 1010 - DNA, 20 bp, Artificial Sequence
  Synthetic
gcacctccgcgggtcacccc

SEQ ID NO: 1011 - DNA, 20 bp, Artificial Sequence
  Synthetic
gtgacccgcggaggtgggag

SEQ ID NO: 1012 - DNA, 20 bp, Artificial Sequence
  Synthetic
gagagagggcgaaggtaggc

SEQ ID NO: 1013 - DNA, 20 bp, Artificial Sequence
  Synthetic
gaggcggggtaaaaaagaga

SEQ ID NO: 1014 - DNA, 20 bp, Artificial Sequence
  Synthetic
gggtaaaaaagagagggcga

SEQ ID NO: 1015 - DNA, 20 bp, Artificial Sequence
  Synthetic
gaggaggtcgagaccgaggg

SEQ ID NO: 1016 - DNA, 20 bp, Artificial Sequence
  Synthetic
gcttcgcctcctgacaggaa

SEQ ID NO: 1017 - DNA, 20 bp, Artificial Sequence
  Synthetic
gtcccccttcgcctcctgac

SEQ ID NO: 1018 - DNA, 20 bp, Artificial Sequence
  Synthetic
gcccgcggctggggaaccaa

SEQ ID NO: 1019 - DNA, 20 bp, Artificial Sequence
  Synthetic
gcgacggttcgcaggggagg

SEQ ID NO: 1020 - DNA, 20 bp, Artificial Sequence
  Synthetic
gctcggtcgacggttcgcag

SEQ ID NO: 1021 - DNA, 20 bp, Artificial Sequence
  Synthetic
gagagctcggcggctgggac

SEQ ID NO: 1022 - DNA, 20 bp, Artificial Sequence
  Synthetic
gcggtggcggaggcgactag

SEQ ID NO: 1023 - DNA, 20 bp, Artificial Sequence
  Synthetic
ggctcggcggctgggactgg

SEQ ID NO: 1024 - DNA, 20 bp, Artificial Sequence
  Synthetic
gcaggccccgtccacgatct

SEQ ID NO: 1025 - DNA, 20 bp, Artificial Sequence
  Synthetic
gggatgaaggcggctttcaa

SEQ ID NO: 1026 - DNA, 20 bp, Artificial Sequence
  Synthetic
gtacccacagaggcccgccg

SEQ ID NO: 1027 - DNA, 20 bp, Artificial Sequence
  Synthetic
gagtttcgcgccaagatcac

SEQ ID NO: 1028 - DNA, 20 bp, Artificial Sequence
  Synthetic
gcacgcggaatccccctcag

SEQ ID NO: 1029 - DNA, 20 bp, Artificial Sequence
  Synthetic
gcaggctgtggtgcgaggtg

SEQ ID NO: 1030 - DNA, 20 bp, Artificial Sequence
  Synthetic
gctgactgcagtagccgcgg

SEQ ID NO: 1031 - DNA, 20 bp, Artificial Sequence
  Synthetic
ggtccggtagaggttctcgc

SEQ ID NO: 1032 - DNA, 20 bp, Artificial Sequence
  Synthetic
gtcctcgtgggattcgttgg

SEQ ID NO: 1033 - DNA, 20 bp, Artificial Sequence
  Synthetic
gcggaggcgccatattggag

SEQ ID NO: 1034 - DNA, 20 bp, Artificial Sequence
  Synthetic
ggagcgggtgctgctagcgg

SEQ ID NO: 1035 - DNA, 20 bp, Artificial Sequence
  Synthetic
ggggcgggcaagagcgcgag

SEQ ID NO: 1036 - DNA, 20 bp, Artificial Sequence
  Synthetic
gcaatcgctgctcttaaagg

SEQ ID NO: 1037 - DNA, 20 bp, Artificial Sequence
  Synthetic
gcgtacttacctgggacccg

SEQ ID NO: 1038 - DNA, 20 bp, Artificial Sequence
  Synthetic
ggcaagaggagctcaactcg

SEQ ID NO: 1039 - DNA, 20 bp, Artificial Sequence
  Synthetic
gagccgcggttcgctctctg

SEQ ID NO: 1040 - DNA, 20 bp, Artificial Sequence
  Synthetic
gaggagcggagcagggacac

SEQ ID NO: 1041 - DNA, 20 bp, Artificial Sequence
  Synthetic
gcgaaccgcggctccaccgt

SEQ ID NO: 1042 - DNA, 20 bp, Artificial Sequence
  Synthetic
gagcacctctggggctatgg

SEQ ID NO: 1043 - DNA, 20 bp, Artificial Sequence
  Synthetic
gcggcgtgggagcacctctg

SEQ ID NO: 1044 - DNA, 20 bp, Artificial Sequence
  Synthetic
ggagtaagctgtggcggcgt

SEQ ID NO: 1045 - DNA, 20 bp, Artificial Sequence
  Synthetic
gaagactcggagtgcgatgg

SEQ ID NO: 1046 - DNA, 20 bp, Artificial Sequence
  Synthetic
gaagttccaaggcccgcgct

SEQ ID NO: 1047 - DNA, 20 bp, Artificial Sequence
  Synthetic
gcccgcgctgggaaaaaggt

SEQ ID NO: 1048 - DNA, 20 bp, Artificial Sequence
  Synthetic
gcctcctacagcaccactac

SEQ ID NO: 1049 - DNA, 20 bp, Artificial Sequence
  Synthetic
ggaggcgctggcaatggact

SEQ ID NO: 1050 - DNA, 20 bp, Artificial Sequence
  Synthetic
ggccggggctgtacaagaag

SEQ ID NO: 1051 - DNA, 20 bp, Artificial Sequence
  Synthetic
gtagcgggagggcagactct

SEQ ID NO: 1052 - DNA, 20 bp, Artificial Sequence
  Synthetic
ggcggggcttgctgctgagg

SEQ ID NO: 1053 - DNA, 20 bp, Artificial Sequence
  Synthetic
gtcacccgtagcttcttccg

SEQ ID NO: 1054 - DNA, 20 bp, Artificial Sequence
  Synthetic
gaataagcgctatgggagga

SEQ ID NO: 1055 - DNA, 20 bp, Artificial Sequence
  Synthetic
gagcggccatagtggaaggg

SEQ ID NO: 1056 - DNA, 20 bp, Artificial Sequence
  Synthetic
ggtgaggcaataagcgctat

SEQ ID NO: 1057 - DNA, 20 bp, Artificial Sequence
  Synthetic
gcggaggcgggggtacgacg

SEQ ID NO: 1058 - DNA, 20 bp, Artificial Sequence
  Synthetic
ggactccctccgcaccccgg

SEQ ID NO: 1059 - DNA, 20 bp, Artificial Sequence
  Synthetic
ggggtacgacggggagcact

SEQ ID NO: 1060 - DNA, 20 bp, Artificial Sequence
  Synthetic
gcggagagcagaagcggtaa

SEQ ID NO: 1061 - DNA, 20 bp, Artificial Sequence
  Synthetic
gcggctcggttctgtctacc

SEQ ID NO: 1062 - DNA, 20 bp, Artificial Sequence
  Synthetic
gcgtcgccgtcagggcccca

SEQ ID NO: 1063 - DNA, 20 bp, Artificial Sequence
  Synthetic
gcccagccctagggccgcat

SEQ ID NO: 1064 - DNA, 20 bp, Artificial Sequence
  Synthetic
gcctcccccgcagcggagag

SEQ ID NO: 1065 - DNA, 20 bp, Artificial Sequence
  Synthetic
ggcctgggaaggttccgcca

SEQ ID NO: 1066 - DNA, 20 bp, Artificial Sequence
  Synthetic
gcaggcgcccgagcccccgg

SEQ ID NO: 1067 - DNA, 20 bp, Artificial Sequence
  Synthetic
gcgactaccagagcccgaga

SEQ ID NO: 1068 - DNA, 20 bp, Artificial Sequence
  Synthetic
gctcctgccgtgctccgggg

SEQ ID NO: 1069 - DNA, 20 bp, Artificial Sequence
  Synthetic
ggccagggtcggctactggg

SEQ ID NO: 1070 - DNA, 20 bp, Artificial Sequence
  Synthetic
ggcgggactaaggaacctga

SEQ ID NO: 1071 - DNA, 20 bp, Artificial Sequence
  Synthetic
ggtgagtccggtgcccgggg

SEQ ID NO: 1072 - DNA, 20 bp, Artificial Sequence
  Synthetic
gcctggcgcagagcagcggg

SEQ ID NO: 1073 - DNA, 20 bp, Artificial Sequence
  Synthetic
ggagatgccccaaactgaca

SEQ ID NO: 1074 - DNA, 20 bp, Artificial Sequence
  Synthetic
ggagctcactgtctccaaga

SEQ ID NO: 1075 - DNA, 20 bp, Artificial Sequence
  Synthetic
gacaacagggggacacaaaa

SEQ ID NO: 1076 - DNA, 20 bp, Artificial Sequence
  Synthetic
gacagggggacacaaaatgg

SEQ ID NO: 1077 - DNA, 20 bp, Artificial Sequence
  Synthetic
gtgtcaacgacaacaacagg

SEQ ID NO: 1078 - DNA, 20 bp, Artificial Sequence
  Synthetic
gactgatacagaggccgcca

SEQ ID NO: 1079 - DNA, 20 bp, Artificial Sequence
  Synthetic
gagggatcgtccgcaggatt

SEQ ID NO: 1080 - DNA, 20 bp, Artificial Sequence
  Synthetic
gtgtatcagtcccaatcctg

SEQ ID NO: 1081 - DNA, 20 bp, Artificial Sequence
  Synthetic
gacttcccttcccgcgatgg

SEQ ID NO: 1082 - DNA, 20 bp, Artificial Sequence
  Synthetic
ggcacagggagctgctgcgg

SEQ ID NO: 1083 - DNA, 20 bp, Artificial Sequence
  Synthetic
ggttgcggcggggacttcag

SEQ ID NO: 1084 - DNA, 20 bp, Artificial Sequence
  Synthetic
gctgcaggagaaggagtccc

SEQ ID NO: 1085 - DNA, 20 bp, Artificial Sequence
  Synthetic
gggttctgacagtaaatcta

SEQ ID NO: 1086 - DNA, 20 bp, Artificial Sequence
  Synthetic
gtcaggatgtaaaagacgaa

SEQ ID NO: 1087 - DNA, 20 bp, Artificial Sequence
  Synthetic
gaagcagtaggatcggccag

SEQ ID NO: 1088 - DNA, 20 bp, Artificial Sequence
  Synthetic
gcagatgccgactttagagg

SEQ ID NO: 1089 - DNA, 20 bp, Artificial Sequence
  Synthetic
gcgcctgctggaaaagcagt

SEQ ID NO: 1090 - DNA, 20 bp, Artificial Sequence
  Synthetic
gcaccccgagggacccccta

SEQ ID NO: 1091 - DNA, 20 bp, Artificial Sequence
  Synthetic
ggccctggcctcaggcggta

SEQ ID NO: 1092 - DNA, 20 bp, Artificial Sequence
  Synthetic
gtggagccgaggccccccga

SEQ ID NO: 1093 - DNA, 20 bp, Artificial Sequence
  Synthetic
gaatgccgtggcgcgaactt

SEQ ID NO: 1094 - DNA, 20 bp, Artificial Sequence
  Synthetic
gcgcgaacttgggactgcag

SEQ ID NO: 1095 - DNA, 20 bp, Artificial Sequence
  Synthetic
gcgtctgcgcgcgaatgccg

SEQ ID NO: 1096 - DNA, 20 bp, Artificial Sequence
  Synthetic
gcaggcgctccaaccgtcgt

SEQ ID NO: 1097 - DNA, 20 bp, Artificial Sequence
  Synthetic
gcggctccggcgctcaccgt

SEQ ID NO: 1098 - DNA, 20 bp, Artificial Sequence
  Synthetic
ggagcaagttccgaggccta

SEQ ID NO: 1099 - DNA, 20 bp, Artificial Sequence
  Synthetic
gcgtcaggtgggaagggtgt

SEQ ID NO: 1100 - DNA, 20 bp, Artificial Sequence
  Synthetic
ggcgccagcttccggcttag

SEQ ID NO: 1101 - DNA, 20 bp, Artificial Sequence
  Synthetic
gttcaggcttgacgtcaggt

SEQ ID NO: 1102 - DNA, 20 bp, Artificial Sequence
  Synthetic
gatccctaggtcctggagca

SEQ ID NO: 1103 - DNA, 20 bp, Artificial Sequence
  Synthetic
gggccaagatccctaggtcc

SEQ ID NO: 1104 - DNA, 20 bp, Artificial Sequence
  Synthetic
ggtggaaggccaagatccct

SEQ ID NO: 1105 - DNA, 20 bp, Artificial Sequence
  Synthetic
ggccgaggccccgggttgag

SEQ ID NO: 1106 - DNA, 20 bp, Artificial Sequence
  Synthetic
ggccgcggggagccaccgac

SEQ ID NO: 1107 - DNA, 20 bp, Artificial Sequence
  Synthetic
ggcgggaggcgcgatcggtc

SEQ ID NO: 1108 - DNA, 20 bp, Artificial Sequence
  Synthetic
gagcgccaggtaccacgagt

SEQ ID NO: 1109 - DNA, 20 bp, Artificial Sequence
  Synthetic
ggaagcaggcgcgcgagacg

SEQ ID NO: 1110 - DNA, 20 bp, Artificial Sequence
  Synthetic
gtggcggcggcttgttgttg

SEQ ID NO: 1111 - DNA, 20 bp, Artificial Sequence
  Synthetic
gactccgccatagagcaggg

SEQ ID NO: 1112 - DNA, 20 bp, Artificial Sequence
  Synthetic
gcgggtctccgggattccaa

SEQ ID NO: 1113 - DNA, 20 bp, Artificial Sequence
  Synthetic
ggattccaagggctcggtta

SEQ ID NO: 1114 - DNA, 20 bp, Artificial Sequence
  Synthetic
gccgacagccccgaccttct

SEQ ID NO: 1115 - DNA, 20 bp, Artificial Sequence
  Synthetic
gcggccgcgcagggcctcaa

SEQ ID NO: 1116 - DNA, 20 bp, Artificial Sequence
  Synthetic
ggaacagccgcggcaagtgg

SEQ ID NO: 1117 - DNA, 20 bp, Artificial Sequence
  Synthetic
gcccagcgccgcaacgccca

SEQ ID NO: 1118 - DNA, 20 bp, Artificial Sequence
  Synthetic
gccggtgccgtgagctgaag

SEQ ID NO: 1119 - DNA, 20 bp, Artificial Sequence
  Synthetic
ggccgcaacgcccagggtgt

SEQ ID NO: 1120 - DNA, 20 bp, Artificial Sequence
  Synthetic
ggggcgcgatctggatttgg

SEQ ID NO: 1121 - DNA, 20 bp, Artificial Sequence
  Synthetic
ggggcgtgcgtgtgaccctc

SEQ ID NO: 1122 - DNA, 20 bp, Artificial Sequence
  Synthetic
ggtgaacgaagaaggcgtcc

SEQ ID NO: 1123 - DNA, 20 bp, Artificial Sequence
  Synthetic
ggatcgtggtactgctatgg

SEQ ID NO: 1124 - DNA, 20 bp, Artificial Sequence
  Synthetic
ggtagtggcggagaggatcg

SEQ ID NO: 1125 - DNA, 20 bp, Artificial Sequence
  Synthetic
gtgttgctgtagtggcggag

SEQ ID NO: 1126 - DNA, 20 bp, Artificial Sequence
  Synthetic
gcgtggcgcaggcgaatcct

SEQ ID NO: 1127 - DNA, 20 bp, Artificial Sequence
  Synthetic
ggacttgtggcggtcgagcg

SEQ ID NO: 1128 - DNA, 20 bp, Artificial Sequence
  Synthetic
ggcaaatatggacctcgcgg

SEQ ID NO: 1129 - DNA, 20 bp, Artificial Sequence
  Synthetic
gatcgctgccgagggccgtg

SEQ ID NO: 1130 - DNA, 20 bp, Artificial Sequence
  Synthetic
gccgcgcttggcgggctcag

SEQ ID NO: 1131 - DNA, 20 bp, Artificial Sequence
  Synthetic
ggaggtcccggtgaaatcag

SEQ ID NO: 1132 - DNA, 20 bp, Artificial Sequence
  Synthetic
gcggaagtagacgtacctca

SEQ ID NO: 1133 - DNA, 20 bp, Artificial Sequence
  Synthetic
ggccggaccgggttagaatc

SEQ ID NO: 1134 - DNA, 20 bp, Artificial Sequence
  Synthetic
ggtcgccgcggagaaattgt

SEQ ID NO: 1135 - DNA, 20 bp, Artificial Sequence
  Synthetic
ggcgcgcggggacttaaagt

SEQ ID NO: 1136 - DNA, 20 bp, Artificial Sequence
  Synthetic
ggctgccggcaacggataga

SEQ ID NO: 1137 - DNA, 20 bp, Artificial Sequence
  Synthetic
ggggttgcgcgttgcagtcg

SEQ ID NO: 1138 - DNA, 20 bp, Artificial Sequence
  Synthetic
ggaagcagccaagctcgccg

SEQ ID NO: 1139 - DNA, 20 bp, Artificial Sequence
  Synthetic
ggcaagaagccgagcccgag

SEQ ID NO: 1140 - DNA, 20 bp, Artificial Sequence
  Synthetic
ggccctgtgtgtcggaaaga

SEQ ID NO: 1141 - DNA, 20 bp, Artificial Sequence
  Synthetic
gaacatggcgatgcacaaca

SEQ ID NO: 1142 - DNA, 20 bp, Artificial Sequence
  Synthetic
ggccgggtgtccgggatctg

SEQ ID NO: 1143 - DNA, 20 bp, Artificial Sequence
  Synthetic
ggggtgtccgggatctgcgg

SEQ ID NO: 1144 - DNA, 20 bp, Artificial Sequence
  Synthetic
gataaacaggaagcgggcgg

SEQ ID NO: 1145 - DNA, 20 bp, Artificial Sequence
  Synthetic
ggcagcagagggagagctcg

SEQ ID NO: 1146 - DNA, 20 bp, Artificial Sequence
  Synthetic
ggcgccccagcttaaagccg

SEQ ID NO: 1147 - DNA, 20 bp, Artificial Sequence
  Synthetic
gcgacgcccgcaggtcctcg

SEQ ID NO: 1148 - DNA, 20 bp, Artificial Sequence
  Synthetic
ggaaaggctgggcaacacct

SEQ ID NO: 1149 - DNA, 20 bp, Artificial Sequence
  Synthetic
gtgcgcaccgcgaggacctg

SEQ ID NO: 1150 - DNA, 20 bp, Artificial Sequence
  Synthetic
gcggcggctggacgagacag

SEQ ID NO: 1151 - DNA, 20 bp, Artificial Sequence
  Synthetic
gcgtggcaggggttattcgg

SEQ ID NO: 1152 - DNA, 20 bp, Artificial Sequence
  Synthetic
gggcacgtcagggaacccgg

SEQ ID NO: 1153 - DNA, 20 bp, Artificial Sequence
  Synthetic
gcgtccgaggcggttggtgt

SEQ ID NO: 1154 - DNA, 20 bp, Artificial Sequence
  Synthetic
ggcacgagcctcaagatcca

SEQ ID NO: 1155 - DNA, 20 bp, Artificial Sequence
  Synthetic
gtctccgacaccaaccgcct

SEQ ID NO: 1156 - DNA, 20 bp, Artificial Sequence
  Synthetic
gaacgcgaactagagaccgt

SEQ ID NO: 1157 - DNA, 20 bp, Artificial Sequence
  Synthetic
ggagggagcggcctcagtac

SEQ ID NO: 1158 - DNA, 20 bp, Artificial Sequence
  Synthetic
gtcgtgcacgaggccccata

SEQ ID NO: 1159 - DNA, 20 bp, Artificial Sequence
  Synthetic
gaaatgtgagcgggtacgac

SEQ ID NO: 1160 - DNA, 20 bp, Artificial Sequence
  Synthetic
gagccgggtacgcgggatac

SEQ ID NO: 1161 - DNA, 20 bp, Artificial Sequence
  Synthetic
ggaacgctccctccccggct

SEQ ID NO: 1162 - DNA, 20 bp, Artificial Sequence
  Synthetic
gctgccaagcgcctgttggt

SEQ ID NO: 1163 - DNA, 20 bp, Artificial Sequence
  Synthetic
gggcgcctgcgagagtctgt

SEQ ID NO: 1164 - DNA, 20 bp, Artificial Sequence
  Synthetic
gtcccttcgcgaaagagcac

SEQ ID NO: 1165 - DNA, 20 bp, Artificial Sequence
  Synthetic
gccggcccaggatgtagagc

SEQ ID NO: 1166 - DNA, 20 bp, Artificial Sequence
  Synthetic
gctaacggcgcaggagatag

SEQ ID NO: 1167 - DNA, 20 bp, Artificial Sequence
  Synthetic
gctgcgggcgctggcaaatc

SEQ ID NO: 1168 - DNA, 20 bp, Artificial Sequence
  Synthetic
gcgaccacggaagcacccct

SEQ ID NO: 1169 - DNA, 20 bp, Artificial Sequence
  Synthetic
gcgctccgccccggtcctag

SEQ ID NO: 1170 - DNA, 20 bp, Artificial Sequence
  Synthetic
gtgggactcggaccccggcg

SEQ ID NO: 1171 - DNA, 20 bp, Artificial Sequence
  Synthetic
gagtctgtcggtcagaccaa

SEQ ID NO: 1172 - DNA, 20 bp, Artificial Sequence
  Synthetic
gcagttccggtgggagaacg

SEQ ID NO: 1173 - DNA, 20 bp, Artificial Sequence
  Synthetic
gctccacccggaccagggta

SEQ ID NO: 1174 - DNA, 20 bp, Artificial Sequence
  Synthetic
ggccgtaaacctgaattccg

SEQ ID NO: 1175 - DNA, 20 bp, Artificial Sequence
  Synthetic
gccgtgaaaagaaaacaaca

SEQ ID NO: 1176 - DNA, 20 bp, Artificial Sequence
  Synthetic
gtgaattccgcgggagagaa

SEQ ID NO: 1177 - DNA, 20 bp, Artificial Sequence
  Synthetic
gagcctgggcgctcaccgac

SEQ ID NO: 1178 - DNA, 20 bp, Artificial Sequence
  Synthetic
gcgagcaaggagcccccggc

SEQ ID NO: 1179 - DNA, 20 bp, Artificial Sequence
  Synthetic
gcttgtggcccagcatggcg

SEQ ID NO: 1180 - DNA, 20 bp, Artificial Sequence
  Synthetic
gaggtgaggaggtttcgaca

SEQ ID NO: 1181 - DNA, 20 bp, Artificial Sequence
  Synthetic
gggaggtgttcaagacccag

SEQ ID NO: 1182 - DNA, 20 bp, Artificial Sequence
  Synthetic
gtttcttcaaccaggaggtg

SEQ ID NO: 1183 - DNA, 20 bp, Artificial Sequence
  Synthetic
gcgcagacgcctgggaactg

SEQ ID NO: 1184 - DNA, 20 bp, Artificial Sequence
  Synthetic
gcttccggcgagacatggca

SEQ ID NO: 1185 - DNA, 20 bp, Artificial Sequence
  Synthetic
ggcaggcttccggcgagaca

SEQ ID NO: 1186 - DNA, 20 bp, Artificial Sequence
  Synthetic
gccctgacccgagaagtatg

SEQ ID NO: 1187 - DNA, 20 bp, Artificial Sequence
  Synthetic
gcggcgcagcttctgtagtt

SEQ ID NO: 1188 - DNA, 20 bp, Artificial Sequence
  Synthetic
gtgtagttgggctactggag

SEQ ID NO: 1189 - DNA, 20 bp, Artificial Sequence
  Synthetic
gaacctgagtcgctacaggt

SEQ ID NO: 1190 - DNA, 20 bp, Artificial Sequence
  Synthetic
gcacagaggaggccggggta

SEQ ID NO: 1191 - DNA, 20 bp, Artificial Sequence
  Synthetic
gcagtaacctgagtcgctac

SEQ ID NO: 1192 - DNA, 20 bp, Artificial Sequence
  Synthetic
gaggagccgcgcggtagatg

SEQ ID NO: 1193 - DNA, 20 bp, Artificial Sequence
  Synthetic
gggagctccgtccgacagaa

SEQ ID NO: 1194 - DNA, 20 bp, Artificial Sequence
  Synthetic
gtccgtccgacagaacggtt

SEQ ID NO: 1195 - DNA, 20 bp, Artificial Sequence
  Synthetic
gaaggagccgggggccgcga

SEQ ID NO: 1196 - DNA, 20 bp, Artificial Sequence
  Synthetic
ggccgggcataaaggcggtg

SEQ ID NO: 1197 - DNA, 20 bp, Artificial Sequence
  Synthetic
gtcggggccgggcataaagg

SEQ ID NO: 1198 - DNA, 20 bp, Artificial Sequence
  Synthetic
gcggaaggaggcgaaccctg

SEQ ID NO: 1199 - DNA, 20 bp, Artificial Sequence
  Synthetic
gggatgaaccgcgacggctg

SEQ ID NO: 1200 - DNA, 20 bp, Artificial Sequence
  Synthetic
ggggccgggatgaaccgcga

SEQ ID NO: 1201 - DNA, 20 bp, Artificial Sequence
  Synthetic
gcatgtaccgggtcggaggt

SEQ ID NO: 1202 - DNA, 20 bp, Artificial Sequence
  Synthetic
gctgctgcctcgccacgggg

SEQ ID NO: 1203 - DNA, 20 bp, Artificial Sequence
  Synthetic
ggccaactgccgggagccaa

SEQ ID NO: 1204 - DNA, 20 bp, Artificial Sequence
  Synthetic
gacggggccccaaacacagg

SEQ ID NO: 1205 - DNA, 20 bp, Artificial Sequence
  Synthetic
gcacagggggcactaacgag

SEQ ID NO: 1206 - DNA, 20 bp, Artificial Sequence
  Synthetic
gtggggccccgtgatctcaa

SEQ ID NO: 1207 - DNA, 20 bp, Artificial Sequence
  Synthetic
gtgaagacagcagaacacgg

SEQ ID NO: 1208 - DNA, 20 bp, Artificial Sequence
  Synthetic
gctcgggctcatagttctag

SEQ ID NO: 1209 - DNA, 20 bp, Artificial Sequence
  Synthetic
ggaggctcctcaagcttcag

SEQ ID NO: 1210 - DNA, 20 bp, Artificial Sequence
  Synthetic
gcaaagcttcccaccctccc

SEQ ID NO: 1211 - DNA, 20 bp, Artificial Sequence
  Synthetic
ggcacagcgggcggtggagt

SEQ ID NO: 1212 - DNA, 20 bp, Artificial Sequence
  Synthetic
gtgtgacagcgaaacgggag

SEQ ID NO: 1213 - DNA, 20 bp, Artificial Sequence
  Synthetic
gagccgacgtagacaggggt

SEQ ID NO: 1214 - DNA, 20 bp, Artificial Sequence
  Synthetic
gcctgccggctggcttgggt

SEQ ID NO: 1215 - DNA, 20 bp, Artificial Sequence
  Synthetic
gtccacggggcagcatccgg

SEQ ID NO: 1216 - DNA, 20 bp, Artificial Sequence
  Synthetic
gagccttcgtccctcctcgt

SEQ ID NO: 1217 - DNA, 20 bp, Artificial Sequence
  Synthetic
gcaggagctgcctacgagga

SEQ ID NO: 1218 - DNA, 20 bp, Artificial Sequence
  Synthetic
gtgcctacgaggagggacga

SEQ ID NO: 1219 - DNA, 20 bp, Artificial Sequence
  Synthetic
gccaggcttactacgtgacc

SEQ ID NO: 1220 - DNA, 20 bp, Artificial Sequence
  Synthetic
ggacaccaggcatacgctag

SEQ ID NO: 1221 - DNA, 20 bp, Artificial Sequence
  Synthetic
gtgtctaccagttcctgaga

SEQ ID NO: 1222 - DNA, 20 bp, Artificial Sequence
  Synthetic
gacatcggtccggctcctca

SEQ ID NO: 1223 - DNA, 20 bp, Artificial Sequence
  Synthetic
gacgtgcaaccgcgtaaccg

SEQ ID NO: 1224 - DNA, 20 bp, Artificial Sequence
  Synthetic
gtgctagacgagcgcggata

SEQ ID NO: 1225 - DNA, 20 bp, Artificial Sequence
  Synthetic
gaacaagtaacccaggcgcc

SEQ ID NO: 1226 - DNA, 20 bp, Artificial Sequence
  Synthetic
gaccgcgggcgtaagccccc

SEQ ID NO: 1227 - DNA, 20 bp, Artificial Sequence
  Synthetic
gaccgctgcacgggttggcg

SEQ ID NO: 1228 - DNA, 20 bp, Artificial Sequence
  Synthetic
gactcatagtcgaacagtgc

SEQ ID NO: 1229 - DNA, 20 bp, Artificial Sequence
  Synthetic
gagatcaatattatgcaaga

SEQ ID NO: 1230 - DNA, 20 bp, Artificial Sequence
  Synthetic
gagcctcttggttccatgga

SEQ ID NO: 1231 - DNA, 20 bp, Artificial Sequence
  Synthetic
gaggcgcctttaatttgcgt

SEQ ID NO: 1232 - DNA, 20 bp, Artificial Sequence
  Synthetic
gagggtaacgcagaagaagg

SEQ ID NO: 1233 - DNA, 20 bp, Artificial Sequence
  Synthetic
gaggtgccccgtcgccgggg

SEQ ID NO: 1234 - DNA, 20 bp, Artificial Sequence
  Synthetic
gagtcgcgcaacgcgcggcc

SEQ ID NO: 1235 - DNA, 20 bp, Artificial Sequence
  Synthetic
gcagcccccagagaaagagc

SEQ ID NO: 1236 - DNA, 20 bp, Artificial Sequence
  Synthetic
gcaggccgccctgctaagaa

SEQ ID NO: 1237 - DNA, 20 bp, Artificial Sequence
  Synthetic
gcagtcctcggcggaggcgt

SEQ ID NO: 1238 - DNA, 20 bp, Artificial Sequence
  Synthetic
gccaacgctagatataaaca

SEQ ID NO: 1239 - DNA, 20 bp, Artificial Sequence
  Synthetic
gccccgcggaaaggcgtctc

SEQ ID NO: 1240 - DNA, 20 bp, Artificial Sequence
  Synthetic
gcccctcgattcccgaacag

SEQ ID NO: 1241 - DNA, 20 bp, Artificial Sequence
  Synthetic
gccgaagctcaagcgtaaga

SEQ ID NO: 1242 - DNA, 20 bp, Artificial Sequence
  Synthetic
gccggcagttgggcagtttg

SEQ ID NO: 1243 - DNA, 20 bp, Artificial Sequence
  Synthetic
gccttacgtgggattcggtt

SEQ ID NO: 1244 - DNA, 20 bp, Artificial Sequence
  Synthetic
gcgacatcggttacatgtgg

SEQ ID NO: 1245 - DNA, 20 bp, Artificial Sequence
  Synthetic
gcgccggaatagcacatcaa

SEQ ID NO: 1246 - DNA, 20 bp, Artificial Sequence
  Synthetic
gcgcgaagacgcgacaccag

SEQ ID NO: 1247 - DNA, 20 bp, Artificial Sequence
  Synthetic
gcgcgcccattcggactgtc

SEQ ID NO: 1248 - DNA, 20 bp, Artificial Sequence
  Synthetic
gcggattccccccacggcga

SEQ ID NO: 1249 - DNA, 20 bp, Artificial Sequence
  Synthetic
gcggggatgtccacactcgg

SEQ ID NO: 1250 - DNA, 20 bp, Artificial Sequence
  Synthetic
gcgtcggggaagccaaccta

SEQ ID NO: 1251 - DNA, 20 bp, Artificial Sequence
  Synthetic
gctgagatgactcaaccacg

SEQ ID NO: 1252 - DNA, 20 bp, Artificial Sequence
  Synthetic
gctgataccgtaaatgaccc

SEQ ID NO: 1253 - DNA, 20 bp, Artificial Sequence
  Synthetic
gctgcactactaaacctccg

SEQ ID NO: 1254 - DNA, 20 bp, Artificial Sequence
  Synthetic
gctttattaccgcaaggaga

SEQ ID NO: 1255 - DNA, 20 bp, Artificial Sequence
  Synthetic
ggaaacgacagggaacccgt

SEQ ID NO: 1256 - DNA, 20 bp, Artificial Sequence
  Synthetic
ggacggcccagagtacaata

SEQ ID NO: 1257 - DNA, 20 bp, Artificial Sequence
  Synthetic
ggactactcgtggcgcttgc

SEQ ID NO: 1258 - DNA, 20 bp, Artificial Sequence
  Synthetic
ggatcgcgccacgaaaatag

SEQ ID NO: 1259 - DNA, 20 bp, Artificial Sequence
  Synthetic
ggcagcgaccggcatgccgc

SEQ ID NO: 1260 - DNA, 20 bp, Artificial Sequence
  Synthetic
ggccgccaaaccgatcacgt

SEQ ID NO: 1261 - DNA, 20 bp, Artificial Sequence
  Synthetic
ggcgtcggcgcgacactgcc

SEQ ID NO: 1262 - DNA, 20 bp, Artificial Sequence
  Synthetic
ggctgcgtgcgccgcgcacg

SEQ ID NO: 1263 - DNA, 20 bp, Artificial Sequence
  Synthetic
ggcttgtcgagtccgagcaa

SEQ ID NO: 1264 - DNA, 20 bp, Artificial Sequence
  Synthetic
gggctccagtgtaaaacccg

SEQ ID NO: 1265 - DNA, 20 bp, Artificial Sequence
  Synthetic
gggggatgggagacaattgg

SEQ ID NO: 1266 - DNA, 20 bp, Artificial Sequence
  Synthetic
ggggtcgaatccacacggta

SEQ ID NO: 1267 - DNA, 20 bp, Artificial Sequence
  Synthetic
gggtagcttcgctccatcag

SEQ ID NO: 1268 - DNA, 20 bp, Artificial Sequence
  Synthetic
gggtcgcactgggaacaaca

SEQ ID NO: 1269 - DNA, 20 bp, Artificial Sequence
  Synthetic
gggtctcgtaccggctggtc

SEQ ID NO: 1270 - DNA, 20 bp, Artificial Sequence
  Synthetic
gggtgggtcacgcggaaggg

SEQ ID NO: 1271 - DNA, 20 bp, Artificial Sequence
  Synthetic
ggtccaggcacactaccggc

SEQ ID NO: 1272 - DNA, 20 bp, Artificial Sequence
  Synthetic
ggtccgaacagcccaggctc

SEQ ID NO: 1273 - DNA, 20 bp, Artificial Sequence
  Synthetic
ggtccggaaccgcccgaggg

SEQ ID NO: 1274 - DNA, 20 bp, Artificial Sequence
  Synthetic
ggtctttcgaaggcagcttt

SEQ ID NO: 1275 - DNA, 20 bp, Artificial Sequence
  Synthetic
ggttggctgtactgggccaa

SEQ ID NO: 1276 - DNA, 20 bp, Artificial Sequence
  Synthetic
gtaaggacgacccgtcacgg

SEQ ID NO: 1277 - DNA, 20 bp, Artificial Sequence
  Synthetic
gtcaccagcgcataagcgca

SEQ ID NO: 1278 - DNA, 20 bp, Artificial Sequence
  Synthetic
gtcctgggccgcagatcgct

SEQ ID NO: 1279 - DNA, 20 bp, Artificial Sequence
  Synthetic
gtctggagagagagacgggc

SEQ ID NO: 1280 - DNA, 20 bp, Artificial Sequence
  Synthetic
gtggagtccgcctctgtcgg

SEQ ID NO: 1281 - DNA, 20 bp, Artificial Sequence
  Synthetic
gtggccccccgatcgtaggt

SEQ ID NO: 1282 - DNA, 20 bp, Artificial Sequence
  Synthetic
gtggttgaacaagccaatag

SEQ ID NO: 1283 - DNA, 20 bp, Artificial Sequence
  Synthetic
gttagggcgtaagggttcga

SEQ ID NO: 1284 - DNA, 20 bp, Artificial Sequence
  Synthetic
gttggttacccctcgattgg

SEQ ID NO: 1285 - DNA, 20 bp, Artificial Sequence
  Synthetic
gagctagcgtgggacagggt

SEQ ID NO: 1286 - DNA, 20 bp, Artificial Sequence
  Synthetic
gcaacagaaccatctcaagt

SEQ ID NO: 1287 - DNA, 20 bp, Artificial Sequence
  Synthetic
ggcggtacgcacaggcccta

SEQ ID NO: 1288 - DNA, 20 bp, Artificial Sequence
  Synthetic
gaggccgcagatctaccgga

SEQ ID NO: 1289 - DNA, 20 bp, Artificial Sequence
  Synthetic
ggcacagccgctccagctgg

SEQ ID NO: 1290 - DNA, 20 bp, Artificial Sequence
  Synthetic
gggcgggcggctgcactcac

SEQ ID NO: 1291 - DNA, 20 bp, Artificial Sequence
  Synthetic
gaccaggccctgcaatcggt

SEQ ID NO: 1292 - DNA, 20 bp, Artificial Sequence
  Synthetic
gatctctgtggccggcactg

SEQ ID NO: 1293 - DNA, 20 bp, Artificial Sequence
  Synthetic
gtctcaccaggccctgcaat

SEQ ID NO: 1294 - DNA, 20 bp, Artificial Sequence
  Synthetic
gagaagggctgcgggttagg

SEQ ID NO: 1295 - DNA, 20 bp, Artificial Sequence
  Synthetic
ggagtgcgtctgggagcccg

SEQ ID NO: 1296 - DNA, 20 bp, Artificial Sequence
  Synthetic
gtgcgggagcgagtgcgtct

SEQ ID NO: 1297 - DNA, 20 bp, Artificial Sequence
  Synthetic
gcccgctcgcgcaaaccgaa

SEQ ID NO: 1298 - DNA, 20 bp, Artificial Sequence
  Synthetic
gccgaaaggcctagagtaag

SEQ ID NO: 1299 - DNA, 20 bp, Artificial Sequence
  Synthetic
gtgcgtgcggctaagagagt

SEQ ID NO: 1300 - DNA, 20 bp, Artificial Sequence
  Synthetic
gcaccaccaagccgcaggga

SEQ ID NO: 1301 - DNA, 20 bp, Artificial Sequence
  Synthetic
ggtgagtcggtaccgacgga

SEQ ID NO: 1302 - DNA, 20 bp, Artificial Sequence
  Synthetic
gtcggtaccgacggagggag

SEQ ID NO: 1303 - DNA, 20 bp, Artificial Sequence
  Synthetic
gcggtcatgccggactcctg

SEQ ID NO: 1304 - DNA, 20 bp, Artificial Sequence
  Synthetic
ggctcctccctacacccccg

SEQ ID NO: 1305 - DNA, 20 bp, Artificial Sequence
  Synthetic
ggggcctctccggagaagag

SEQ ID NO: 1306 - DNA, 20 bp, Artificial Sequence
  Synthetic
ggaggccacgcccccggaag

SEQ ID NO: 1307 - DNA, 20 bp, Artificial Sequence
  Synthetic
ggagtcgtggtgaccaggga

SEQ ID NO: 1308 - DNA, 20 bp, Artificial Sequence
  Synthetic
ggccacgcccccggaagcgg

SEQ ID NO: 1309 - DNA, 20 bp, Artificial Sequence
  Synthetic
gggtaggcggggctactacg

SEQ ID NO: 1310 - DNA, 20 bp, Artificial Sequence
  Synthetic
gtacgatgccccatgcgcct

SEQ ID NO: 1311 - DNA, 20 bp, Artificial Sequence
  Synthetic
gtcagagcgagggcacggga

SEQ ID NO: 1312 - DNA, 20 bp, Artificial Sequence
  Synthetic
gaggcgccccaggaaggaat

SEQ ID NO: 1313 - DNA, 20 bp, Artificial Sequence
  Synthetic
gatttaattggccggagttt

SEQ ID NO: 1314 - DNA, 20 bp, Artificial Sequence
  Synthetic
gctctgaccccgctttccca

SEQ ID NO: 1315 - DNA, 20 bp, Artificial Sequence
  Synthetic
gaccatgcttgcctgtttat

SEQ ID NO: 1316 - DNA, 20 bp, Artificial Sequence
  Synthetic
gagacacagggcccataaac

SEQ ID NO: 1317 - DNA, 20 bp, Artificial Sequence
  Synthetic
gcctagtagaatgtctctaa

SEQ ID NO: 1318 - DNA, 20 bp, Artificial Sequence
  Synthetic
gcgtgcgctcacccagccgc

SEQ ID NO: 1319 - DNA, 20 bp, Artificial Sequence
  Synthetic
ggcaatctatcagggaacgg

SEQ ID NO: 1320 - DNA, 20 bp, Artificial Sequence
  Synthetic
ggccggtgcggcgtgttcgg

SEQ ID NO: 1321 - DNA, 20 bp, Artificial Sequence
  Synthetic
gcgcggcggcgacggagcac

SEQ ID NO: 1322 - DNA, 20 bp, Artificial Sequence
  Synthetic
gggcgacggagcaccggcgg

SEQ ID NO: 1323 - DNA, 20 bp, Artificial Sequence
  Synthetic
gggcggcgacggagcaccgg

SEQ ID NO: 1324 - DNA, 20 bp, Artificial Sequence
  Synthetic
gagtcaggcgaccagtccca

SEQ ID NO: 1325 - DNA, 20 bp, Artificial Sequence
  Synthetic
gcctacccctcaggacacac

SEQ ID NO: 1326 - DNA, 20 bp, Artificial Sequence
  Synthetic
gggccacatgagcagcgcta

SEQ ID NO: 1327 - DNA, 20 bp, Artificial Sequence
  Synthetic
gaggtttgaactgtattcag

SEQ ID NO: 1328 - DNA, 20 bp, Artificial Sequence
  Synthetic
gcgcgggagggcatcccgtt

SEQ ID NO: 1329 - DNA, 20 bp, Artificial Sequence
  Synthetic
ggcgagacttacgtgattag

SEQ ID NO: 1330 - DNA, 20 bp, Artificial Sequence
  Synthetic
gcctgaggagatgttcaggg

SEQ ID NO: 1331 - DNA, 20 bp, Artificial Sequence
  Synthetic
gcgggccgccgcgatcatgt

SEQ ID NO: 1332 - DNA, 20 bp, Artificial Sequence
  Synthetic
ggcctggtccgacatgatcg

SEQ ID NO: 1333 - DNA, 20 bp, Artificial Sequence
  Synthetic
ggcggcaccgggaggggtaa

SEQ ID NO: 1334 - DNA, 20 bp, Artificial Sequence
  Synthetic
ggcggcgggtgccgaagcga

SEQ ID NO: 1335 - DNA, 20 bp, Artificial Sequence
  Synthetic
gtttgcggcggcaccgggag

SEQ ID NO: 1336 - DNA, 20 bp, Artificial Sequence
  Synthetic
ggtcaggcgagtccacgtga

SEQ ID NO: 1337 - DNA, 20 bp, Artificial Sequence
  Synthetic
gtaagatggcgtctcctcag

SEQ ID NO: 1338 - DNA, 20 bp, Artificial Sequence
  Synthetic
gtcgcaatctggcccccctg

SEQ ID NO: 1339 - DNA, 20 bp, Artificial Sequence
  Synthetic
ggagaaacctacggtaagaa

SEQ ID NO: 1340 - DNA, 20 bp, Artificial Sequence
  Synthetic
ggccgcccgggcgagcgaca

SEQ ID NO: 1341 - DNA, 20 bp, Artificial Sequence
  Synthetic
ggcgggaggggagaaaccta

SEQ ID NO: 1342 - DNA, 20 bp, Artificial Sequence
  Synthetic
gccgcgaagctgggggcctc

SEQ ID NO: 1343 - DNA, 20 bp, Artificial Sequence
  Synthetic
gctcctggtcgccggccaga

SEQ ID NO: 1344 - DNA, 20 bp, Artificial Sequence
  Synthetic
gtcgagctggggtcactcgg

SEQ ID NO: 1345 - DNA, 20 bp, Artificial Sequence
  Synthetic
gcctctgggtcccccccaag

SEQ ID NO: 1346 - DNA, 20 bp, Artificial Sequence
  Synthetic
gctgggtcccccccaagagg

SEQ ID NO: 1347 - DNA, 20 bp, Artificial Sequence
  Synthetic
ggaggagaaaaaagcccgtc

SEQ ID NO: 1348 - DNA, 20 bp, Artificial Sequence
  Synthetic
gactcggctcaggcccgaca

SEQ ID NO: 1349 - DNA, 20 bp, Artificial Sequence
  Synthetic
gggtccggtgccgcctccaa

SEQ ID NO: 1350 - DNA, 20 bp, Artificial Sequence
  Synthetic
ggtggagttgcccttggagg

SEQ ID NO: 1351 - DNA, 20 bp, Artificial Sequence
  Synthetic
gagtgtgggtccagagatca

SEQ ID NO: 1352 - DNA, 20 bp, Artificial Sequence
  Synthetic
gcagataaggtgcaaatcaa

SEQ ID NO: 1353 - DNA, 20 bp, Artificial Sequence
  Synthetic
gcatggtcgggagagacacc

SEQ ID NO: 1354 - DNA, 20 bp, Artificial Sequence
  Synthetic
gtcgggagagacaccaggcg

SEQ ID NO: 1355 - DNA, 20 bp, Artificial Sequence
  Synthetic
gtctctcccgaccatggagg

SEQ ID NO: 1356 - DNA, 20 bp, Artificial Sequence
  Synthetic
gcaggagcctcagagcgagc

SEQ ID NO: 1357 - DNA, 20 bp, Artificial Sequence
  Synthetic
ggcgtggtgacgtcgcaacg

SEQ ID NO: 1358 - DNA, 20 bp, Artificial Sequence
  Synthetic
ggggcgaacgtcgcgacgac

SEQ ID NO: 1359 - DNA, 20 bp, Artificial Sequence
  Synthetic
gaggcgattggatgcggcgg

SEQ ID NO: 1360 - DNA, 20 bp, Artificial Sequence
  Synthetic
ggagtagcgagtcggcaacc

SEQ ID NO: 1361 - DNA, 20 bp, Artificial Sequence
  Synthetic
gtagcgagtcggcaacccgg

SEQ ID NO: 1362 - DNA, 20 bp, Artificial Sequence
  Synthetic
gagcggtgagtgctcgggga

SEQ ID NO: 1363 - DNA, 20 bp, Artificial Sequence
  Synthetic
gcaggtctagagggacgggg

SEQ ID NO: 1364 - DNA, 20 bp, Artificial Sequence
  Synthetic
gcgccgagcggtgagtgctc

SEQ ID NO: 1365 - DNA, 20 bp, Artificial Sequence
  Synthetic
ggacactcctgcgaccaggt

SEQ ID NO: 1366 - DNA, 20 bp, Artificial Sequence
  Synthetic
ggcccggtggagcttccact

SEQ ID NO: 1367 - DNA, 20 bp, Artificial Sequence
  Synthetic
gggccgcagagatgcctacc

SEQ ID NO: 1368 - DNA, 20 bp, Artificial Sequence
  Synthetic
gccaaccggcgagcagaact

SEQ ID NO: 1369 - DNA, 20 bp, Artificial Sequence
  Synthetic
gctgcggggaggtgcttccg

SEQ ID NO: 1370 - DNA, 20 bp, Artificial Sequence
  Synthetic
ggggaacgcacctctcggag

SEQ ID NO: 1371 - DNA, 20 bp, Artificial Sequence
  Synthetic
gagccgccgcggagacaatg

SEQ ID NO: 1372 - DNA, 20 bp, Artificial Sequence
  Synthetic
gcaatgcggcgagtctggga

SEQ ID NO: 1373 - DNA, 20 bp, Artificial Sequence
  Synthetic
gtcgagggctgcagccgccg

SEQ ID NO: 1374 - DNA, 20 bp, Artificial Sequence
  Synthetic
gagcggagtgagtgactaga

SEQ ID NO: 1375 - DNA, 20 bp, Artificial Sequence
  Synthetic
gctgatgtcgtaactagggg

SEQ ID NO: 1376 - DNA, 20 bp, Artificial Sequence
  Synthetic
ggcgcagcccatgttagtga

SEQ ID NO: 1377 - DNA, 20 bp, Artificial Sequence
  Synthetic
gaatggaggaggcccagcgg

SEQ ID NO: 1378 - DNA, 20 bp, Artificial Sequence
  Synthetic
gagtacaacgccgggccgtg

SEQ ID NO: 1379 - DNA, 20 bp, Artificial Sequence
  Synthetic
ggcgccgcgcctgagaccgg

SEQ ID NO: 1380 - DNA, 20 bp, Artificial Sequence
  Synthetic
gatagggagtccggaggtag

SEQ ID NO: 1381 - DNA, 20 bp, Artificial Sequence
  Synthetic
ggcggacagtgcggaactaa

SEQ ID NO: 1382 - DNA, 20 bp, Artificial Sequence
  Synthetic
ggctgacagacgcaagatgg

SEQ ID NO: 1383 - DNA, 20 bp, Artificial Sequence
  Synthetic
gcgccaccgctcactcactt

SEQ ID NO: 1384 - DNA, 20 bp, Artificial Sequence
  Synthetic
ggggacgctggtgaccaaga

SEQ ID NO: 1385 - DNA, 20 bp, Artificial Sequence
  Synthetic
gtcaccagcgtcccccgcgc

SEQ ID NO: 1386 - DNA, 20 bp, Artificial Sequence
  Synthetic
gagtgtctgcccgaacccag

SEQ ID NO: 1387 - DNA, 20 bp, Artificial Sequence
  Synthetic
gctctttgctccccacctct

SEQ ID NO: 1388 - DNA, 20 bp, Artificial Sequence
  Synthetic
ggtctgcccgaacccagagg

SEQ ID NO: 1389 - DNA, 20 bp, Artificial Sequence
  Synthetic
gcagtgaggacgggaaagaa

SEQ ID NO: 1390 - DNA, 20 bp, Artificial Sequence
  Synthetic
ggcgcaatgtgcgcaggaag

SEQ ID NO: 1391 - DNA, 20 bp, Artificial Sequence
  Synthetic
gggccgagcctagcacagtg

SEQ ID NO: 1392 - DNA, 20 bp, Artificial Sequence
  Synthetic
ggaggtctgcagcgcagctt

SEQ ID NO: 1393 - DNA, 20 bp, Artificial Sequence
  Synthetic
ggagtgctgcagtgactgca

SEQ ID NO: 1394 - DNA, 20 bp, Artificial Sequence
  Synthetic
gggaggctctgctcggatcg

SEQ ID NO: 1395 - DNA, 20 bp, Artificial Sequence
  Synthetic
gcggaccaggacgagtagag

SEQ ID NO: 1396 - DNA, 20 bp, Artificial Sequence
  Synthetic
gtccgggcgcgaacgctata

SEQ ID NO: 1397 - DNA, 20 bp, Artificial Sequence
  Synthetic
gtgcgcatcgggtgagacgc

SEQ ID NO: 1398 - DNA, 20 bp, Artificial Sequence
  Synthetic
gccaatgggagttcaggagg

SEQ ID NO: 1399 - DNA, 20 bp, Artificial Sequence
  Synthetic
ggcctcaaggcgcacccaag

SEQ ID NO: 1400 - DNA, 20 bp, Artificial Sequence
  Synthetic
gggatcgggtgttgcatcca

SEQ ID NO: 1401 - DNA, 20 bp, Artificial Sequence
  Synthetic
gccaggccggcacccaggat

SEQ ID NO: 1402 - DNA, 20 bp, Artificial Sequence
  Synthetic
ggttgcaggcggggcacctc

SEQ ID NO: 1403 - DNA, 20 bp, Artificial Sequence
  Synthetic
gtcacggccacttccgacca

SEQ ID NO: 1404 - DNA, 20 bp, Artificial Sequence
  Synthetic
gccttggtcgtccccggcgg

SEQ ID NO: 1405 - DNA, 20 bp, Artificial Sequence
  Synthetic
gcgactgtggagactctcag

SEQ ID NO: 1406 - DNA, 20 bp, Artificial Sequence
  Synthetic
gcgcagaccttggtcgtccc

SEQ ID NO: 1407 - DNA, 20 bp, Artificial Sequence
  Synthetic
gagggagcagaaatctcgag

SEQ ID NO: 1408 - DNA, 20 bp, Artificial Sequence
  Synthetic
ggaagcaggacgttctcacc

SEQ ID NO: 1409 - DNA, 20 bp, Artificial Sequence
  Synthetic
ggtggggttccggaatgagc

SEQ ID NO: 1410 - DNA, 20 bp, Artificial Sequence
  Synthetic
gccctctcccagcttgaagg

SEQ ID NO: 1411 - DNA, 20 bp, Artificial Sequence
  Synthetic
ggcgccccgccccccatcgg

SEQ ID NO: 1412 - DNA, 20 bp, Artificial Sequence
  Synthetic
gggtaccaggacttggagac

SEQ ID NO: 1413 - DNA, 20 bp, Artificial Sequence
  Synthetic
gcgggaaacgctgtttgaag

SEQ ID NO: 1414 - DNA, 20 bp, Artificial Sequence
  Synthetic
gttgaagcgggtgagtagag

SEQ ID NO: 1415 - DNA, 20 bp, Artificial Sequence
  Synthetic
gttgcgcgcgcgggagtcag

SEQ ID NO: 1416 - DNA, 20 bp, Artificial Sequence
  Synthetic
gcagccaggccgcgctactc

SEQ ID NO: 1417 - DNA, 20 bp, Artificial Sequence
  Synthetic
ggcgcggtgagtggggtcca

SEQ ID NO: 1418 - DNA, 20 bp, Artificial Sequence
  Synthetic
ggctcgaacgtgcttgatgg

SEQ ID NO: 1419 - DNA, 20 bp, Artificial Sequence
  Synthetic
gaagctggtccgccatggtg

SEQ ID NO: 1420 - DNA, 20 bp, Artificial Sequence
  Synthetic
gcaacggaggcgacgcacta

SEQ ID NO: 1421 - DNA, 20 bp, Artificial Sequence
  Synthetic
ggagcaaagacgtttcccgc

SEQ ID NO: 1422 - DNA, 20 bp, Artificial Sequence
  Synthetic
gagaggagagaccggccagt

SEQ ID NO: 1423 - DNA, 20 bp, Artificial Sequence
  Synthetic
gcacccgagctaggtctctg

SEQ ID NO: 1424 - DNA, 20 bp, Artificial Sequence
  Synthetic
gctagaggaggcccctagag

SEQ ID NO: 1425 - DNA, 20 bp, Artificial Sequence
  Synthetic
gaagatggcggacatctccc

SEQ ID NO: 1426 - DNA, 20 bp, Artificial Sequence
  Synthetic
gctcatcaggaagcgcgggg

SEQ ID NO: 1427 - DNA, 20 bp, Artificial Sequence
  Synthetic
gctccctggacgaactcatc

SEQ ID NO: 1428 - DNA, 20 bp, Artificial Sequence
  Synthetic
gccccgagcccctccgtcgg

SEQ ID NO: 1429 - DNA, 20 bp, Artificial Sequence
  Synthetic
gctcagagacatggagccgt

SEQ ID NO: 1430 - DNA, 20 bp, Artificial Sequence
  Synthetic
gggctctcgcgagtctgggt

SEQ ID NO: 1431 - DNA, 20 bp, Artificial Sequence
  Synthetic
gcgcaaatatggcgccggag

SEQ ID NO: 1432 - DNA, 20 bp, Artificial Sequence
  Synthetic
gggcagcttgaagggcgaga

SEQ ID NO: 1433 - DNA, 20 bp, Artificial Sequence
  Synthetic
gtgggctcgggcagcttgaa

SEQ ID NO: 1434 - DNA, 20 bp, Artificial Sequence
  Synthetic
gccctgaagcggaggcgaag

SEQ ID NO: 1435 - DNA, 20 bp, Artificial Sequence
  Synthetic
gcgtagcgacgcgggaagtc

SEQ ID NO: 1436 - DNA, 20 bp, Artificial Sequence
  Synthetic
gggcggacgaacgggcagga

SEQ ID NO: 1437 - DNA, 20 bp, Artificial Sequence
  Synthetic
gcgcgcgcctacacagggtg

SEQ ID NO: 1438 - DNA, 20 bp, Artificial Sequence
  Synthetic
ggcagcgcactgccgcgtag

SEQ ID NO: 1439 - DNA, 20 bp, Artificial Sequence
  Synthetic
gggaagcgggacgccccgag

SEQ ID NO: 1440 - DNA, 20 bp, Artificial Sequence
  Synthetic
gcctcgctccctgactggag

SEQ ID NO: 1441 - DNA, 20 bp, Artificial Sequence
  Synthetic
ggggtgcagacgggaagttg

SEQ ID NO: 1442 - DNA, 20 bp, Artificial Sequence
  Synthetic
ggtagcgtgtggcctccacc

SEQ ID NO: 1443 - DNA, 20 bp, Artificial Sequence
  Synthetic
gattctgttaacggtagtgg

SEQ ID NO: 1444 - DNA, 20 bp, Artificial Sequence
  Synthetic
gcctctccggattctgttaa

SEQ ID NO: 1445 - DNA, 20 bp, Artificial Sequence
  Synthetic
gcggattctgttaacggtag

SEQ ID NO: 1446 - DNA, 20 bp, Artificial Sequence
  Synthetic
gagcagggatcagacgagag

SEQ ID NO: 1447 - DNA, 20 bp, Artificial Sequence
  Synthetic
gcaatgcagccgccagactg

SEQ ID NO: 1448 - DNA, 20 bp, Artificial Sequence
  Synthetic
ggtctggcggctgcattgct

SEQ ID NO: 1449 - DNA, 20 bp, Artificial Sequence
  Synthetic
gaagctgggggtggagccgg

SEQ ID NO: 1450 - DNA, 20 bp, Artificial Sequence
  Synthetic
gacgcggcgggtacctctag

SEQ ID NO: 1451 - DNA, 20 bp, Artificial Sequence
  Synthetic
gatggaactggcggacgtgg

SEQ ID NO: 1452 - DNA, 20 bp, Artificial Sequence
  Synthetic
gagtcgcgatcctgaggtaa

SEQ ID NO: 1453 - DNA, 20 bp, Artificial Sequence
  Synthetic
gcgactgacaaggccccaag

SEQ ID NO: 1454 - DNA, 20 bp, Artificial Sequence
  Synthetic
gggacaagcgatccccgcgc

SEQ ID NO: 1455 - DNA, 20 bp, Artificial Sequence
  Synthetic
gaagctagtcacccgggggt

SEQ ID NO: 1456 - DNA, 20 bp, Artificial Sequence
  Synthetic
gagactcttggggccggggt

SEQ ID NO: 1457 - DNA, 20 bp, Artificial Sequence
  Synthetic
gggccaagctagtcacccgg

SEQ ID NO: 1458 - DNA, 20 bp, Artificial Sequence
  Synthetic
gagggaaactccgagcgaga

SEQ ID NO: 1459 - DNA, 20 bp, Artificial Sequence
  Synthetic
gcagcgcggagcgaacgcag

SEQ ID NO: 1460 - DNA, 20 bp, Artificial Sequence
  Synthetic
gcccaatgctccccaaacgg

SEQ ID NO: 1461 - DNA, 20 bp, Artificial Sequence
  Synthetic
gcaaggagggtcaggaggcg

SEQ ID NO: 1462 - DNA, 20 bp, Artificial Sequence
  Synthetic
ggcaggcggcacatcactct

SEQ ID NO: 1463 - DNA, 20 bp, Artificial Sequence
  Synthetic
gtggccagcggtggctcttg

SEQ ID NO: 1464 - DNA, 20 bp, Artificial Sequence
  Synthetic
gcgcgcctcgcactgcctca

SEQ ID NO: 1465 - DNA, 20 bp, Artificial Sequence
  Synthetic
gggcccgcgtcagtcacctc

SEQ ID NO: 1466 - DNA, 20 bp, Artificial Sequence
  Synthetic
gggctcctgcgagaagcaag

SEQ ID NO: 1467 - DNA, 20 bp, Artificial Sequence
  Synthetic
gcagggttctcccgagaggg

SEQ ID NO: 1468 - DNA, 20 bp, Artificial Sequence
  Synthetic
gggccagggttctcccgaga

SEQ ID NO: 1469 - DNA, 20 bp, Artificial Sequence
  Synthetic
ggtcccagcgtcctccctct

SEQ ID NO: 1470 - DNA, 20 bp, Artificial Sequence
  Synthetic
ggcaagcgcggaaggctggg

SEQ ID NO: 1471 - DNA, 20 bp, Artificial Sequence
  Synthetic
ggttcttccaatagcggccc

SEQ ID NO: 1472 - DNA, 20 bp, Artificial Sequence
  Synthetic
gttcacggttcttccaatag

SEQ ID NO: 1473 - DNA, 20 bp, Artificial Sequence
  Synthetic
gaacatggccgccgcctgag

SEQ ID NO: 1474 - DNA, 20 bp, Artificial Sequence
  Synthetic
gcgccgcctgagaggagagc

SEQ ID NO: 1475 - DNA, 20 bp, Artificial Sequence
  Synthetic
gtacccgcgggctgcagaga

SEQ ID NO: 1476 - DNA, 20 bp, Artificial Sequence
  Synthetic
gcgcgcgtccaccggctccc

SEQ ID NO: 1477 - DNA, 20 bp, Artificial Sequence
  Synthetic
ggccgccgcccggagaacag

SEQ ID NO: 1478 - DNA, 20 bp, Artificial Sequence
  Synthetic
ggcgccgctccatgtagccc

SEQ ID NO: 1479 - DNA, 20 bp, Artificial Sequence
  Synthetic
gagcagggagcaacgcacac

SEQ ID NO: 1480 - DNA, 20 bp, Artificial Sequence
  Synthetic
ggcgggactcggcggcatgg

SEQ ID NO: 1481 - DNA, 20 bp, Artificial Sequence
  Synthetic
gggccagggcagcaccgcag

SEQ ID NO: 1482 - DNA, 20 bp, Artificial Sequence
  Synthetic
gctagcgtagcgcttcacgt

SEQ ID NO: 1483 - DNA, 20 bp, Artificial Sequence
  Synthetic
ggcgcctcggagcacggtga

SEQ ID NO: 1484 - DNA, 20 bp, Artificial Sequence
  Synthetic
gtgctgccgggactgctccg

SEQ ID NO: 1485 - DNA, 20 bp, Artificial Sequence
  Synthetic
gggcactaggcggagagagg

SEQ ID NO: 1486 - DNA, 20 bp, Artificial Sequence
  Synthetic
gggtaagccgcgaggaggaa

SEQ ID NO: 1487 - DNA, 20 bp, Artificial Sequence
  Synthetic
gtagcaggatcggtccacag

SEQ ID NO: 1488 - DNA, 20 bp, Artificial Sequence
  Synthetic
gcagaggcgtctcaacggct

SEQ ID NO: 1489 - DNA, 20 bp, Artificial Sequence
  Synthetic
gcgcgggagcagcgcagcta

SEQ ID NO: 1490 - DNA, 20 bp, Artificial Sequence
  Synthetic
gtgccgcagaggcgtctcaa

SEQ ID NO: 1491 - DNA, 20 bp, Artificial Sequence
  Synthetic
gacctcgccccttgcaacaa

SEQ ID NO: 1492 - DNA, 20 bp, Artificial Sequence
  Synthetic
ggagtcatccgtccagaagg

SEQ ID NO: 1493 - DNA, 20 bp, Artificial Sequence
  Synthetic
gggttgctaccgctgagtcc

SEQ ID NO: 1494 - DNA, 20 bp, Artificial Sequence
  Synthetic
gggagggccggtctgaagag

SEQ ID NO: 1495 - DNA, 20 bp, Artificial Sequence
  Synthetic
gaggcggctccgaggaaccg

SEQ ID NO: 1496 - DNA, 20 bp, Artificial Sequence
  Synthetic
ggccgcctcgctcctcttca

SEQ ID NO: 1497 - DNA, 20 bp, Artificial Sequence
  Synthetic
gcgaagagcggaggcgacca

SEQ ID NO: 1498 - DNA, 20 bp, Artificial Sequence
  Synthetic
ggggactaccctaggtgaaa

SEQ ID NO: 1499 - DNA, 20 bp, Artificial Sequence
  Synthetic
ggggaggccgtacctccgag

SEQ ID NO: 1500 - DNA, 20 bp, Artificial Sequence
  Synthetic
gagcgccggaggctagtggg

SEQ ID NO: 1501 - DNA, 20 bp, Artificial Sequence
  Synthetic
gtcgctcccgaggatgctgg

SEQ ID NO: 1502 - DNA, 20 bp, Artificial Sequence
  Synthetic
gtggagcgccggaggctagt

SEQ ID NO: 1503 - DNA, 20 bp, Artificial Sequence
  Synthetic
gaaggaggcgccggctgtgg

SEQ ID NO: 1504 - DNA, 20 bp, Artificial Sequence
  Synthetic
gcaggagtccggctccccga

SEQ ID NO: 1505 - DNA, 20 bp, Artificial Sequence
  Synthetic
gcgatttgaaccgaggattt

SEQ ID NO: 1506 - DNA, 20 bp, Artificial Sequence
  Synthetic
gcgcctgggcgctaagatgg

SEQ ID NO: 1507 - DNA, 20 bp, Artificial Sequence
  Synthetic
gtgcctgccccggaagtggt

SEQ ID NO: 1508 - DNA, 20 bp, Artificial Sequence
  Synthetic
gtggcggggcccgagcgacg

SEQ ID NO: 1509 - DNA, 20 bp, Artificial Sequence
  Synthetic
gccgctagctcaccacagga

SEQ ID NO: 1510 - DNA, 20 bp, Artificial Sequence
  Synthetic
ggaatccgctagctcaccac

SEQ ID NO: 1511 - DNA, 20 bp, Artificial Sequence
  Synthetic
ggtctgcagaaggcgcgagg

SEQ ID NO: 1512 - DNA, 20 bp, Artificial Sequence
  Synthetic
gcggggtcgcattgtggcta

SEQ ID NO: 1513 - DNA, 20 bp, Artificial Sequence
  Synthetic
gcggttgcggggtcgcattg

SEQ ID NO: 1514 - DNA, 20 bp, Artificial Sequence
  Synthetic
ggccgccctgcggatcacgt

SEQ ID NO: 1515 - DNA, 20 bp, Artificial Sequence
  Synthetic
gaagcgccgcactctcctta

SEQ ID NO: 1516 - DNA, 20 bp, Artificial Sequence
  Synthetic
gccgagccctaaggagagtg

SEQ ID NO: 1517 - DNA, 20 bp, Artificial Sequence
  Synthetic
gggccagagaccgagcccta

SEQ ID NO: 1518 - DNA, 20 bp, Artificial Sequence
  Synthetic
gcacctcacaggccgcacca

SEQ ID NO: 1519 - DNA, 20 bp, Artificial Sequence
  Synthetic
ggatacttctgagcaacggg

SEQ ID NO: 1520 - DNA, 20 bp, Artificial Sequence
  Synthetic
gggcggagggctccgaagtc

SEQ ID NO: 1521 - DNA, 20 bp, Artificial Sequence
  Synthetic
ggaaccccacttccccacaa

SEQ ID NO: 1522 - DNA, 20 bp, Artificial Sequence
  Synthetic
gggtggggaaacttgaaagt

SEQ ID NO: 1523 - DNA, 20 bp, Artificial Sequence
  Synthetic
gtcgtgggtttcgatattgg

SEQ ID NO: 1524 - DNA, 20 bp, Artificial Sequence
  Synthetic
gactgctgaggaactcctag

SEQ ID NO: 1525 - DNA, 20 bp, Artificial Sequence
  Synthetic
gcaggctcacctgctaaccc

SEQ ID NO: 1526 - DNA, 20 bp, Artificial Sequence
  Synthetic
gggcgagagaacgaagactg

SEQ ID NO: 1527 - DNA, 20 bp, Artificial Sequence
  Synthetic
gctgggcgcgggaatcccgg

SEQ ID NO: 1528 - DNA, 20 bp, Artificial Sequence
  Synthetic
ggaggaggaggcggcaccaa

SEQ ID NO: 1529 - DNA, 20 bp, Artificial Sequence
  Synthetic
gggaggcggcaccaagggta

SEQ ID NO: 1530 - DNA, 20 bp, Artificial Sequence
  Synthetic
gcacacagggagctcgatct

SEQ ID NO: 1531 - DNA, 20 bp, Artificial Sequence
  Synthetic
ggcagcgcgcggtgcacaca

SEQ ID NO: 1532 - DNA, 20 bp, Artificial Sequence
  Synthetic
ggcccgaggcgcgtaagtgg

SEQ ID NO: 1533 - DNA, 20 bp, Artificial Sequence
  Synthetic
gcacgctcccgggaggctga

SEQ ID NO: 1534 - DNA, 20 bp, Artificial Sequence
  Synthetic
ggccgcgtcacgctcccggg

SEQ ID NO: 1535 - DNA, 20 bp, Artificial Sequence
  Synthetic
ggcctcccgggagcgtgacg

SEQ ID NO: 1536 - DNA, 20 bp, Artificial Sequence
  Synthetic
gccggcggcgaggggatagc

SEQ ID NO: 1537 - DNA, 20 bp, Artificial Sequence
  Synthetic
ggatccttgagcttctccgg

SEQ ID NO: 1538 - DNA, 20 bp, Artificial Sequence
  Synthetic
ggggatagctggttaccaga

SEQ ID NO: 1539 - DNA, 20 bp, Artificial Sequence
  Synthetic
ggcgcgctttgggaacagga

SEQ ID NO: 1540 - DNA, 20 bp, Artificial Sequence
  Synthetic
ggcgggaggttcgattgacc

SEQ ID NO: 1541 - DNA, 20 bp, Artificial Sequence
  Synthetic
gtaacgcgcgctttgggaac

SEQ ID NO: 1542 - DNA, 20 bp, Artificial Sequence
  Synthetic
gaacaggaggagtaagattg

SEQ ID NO: 1543 - DNA, 20 bp, Artificial Sequence
  Synthetic
gcttactcctcctgttccaa

SEQ ID NO: 1544 - DNA, 20 bp, Artificial Sequence
  Synthetic
ggagtgctgtcccttggaac

SEQ ID NO: 1545 - DNA, 20 bp, Artificial Sequence
  Synthetic
gacggccttgccgagcactg

SEQ ID NO: 1546 - DNA, 20 bp, Artificial Sequence
  Synthetic
gagaagagcggaagggggtt

SEQ ID NO: 1547 - DNA, 20 bp, Artificial Sequence
  Synthetic
ggaagggaccccggacccgg

SEQ ID NO: 1548 - DNA, 20 bp, Artificial Sequence
  Synthetic
gccgccatggccgacaagga

SEQ ID NO: 1549 - DNA, 20 bp, Artificial Sequence
  Synthetic
gggggcgcaggaaacaatag

SEQ ID NO: 1550 - DNA, 20 bp, Artificial Sequence
  Synthetic
ggtgcagtccccggtactga

SEQ ID NO: 1551 - DNA, 20 bp, Artificial Sequence
  Synthetic
gagtgtgacgcgcttgggaa

SEQ ID NO: 1552 - DNA, 20 bp, Artificial Sequence
  Synthetic
gtaacgagaggagtccgagg

SEQ ID NO: 1553 - DNA, 20 bp, Artificial Sequence
  Synthetic
gtcgcgggtaccgaggtctg

SEQ ID NO: 1554 - DNA, 20 bp, Artificial Sequence
  Synthetic
gaatcccgaggcaatctcgg

SEQ ID NO: 1555 - DNA, 20 bp, Artificial Sequence
  Synthetic
gccagacccgcacgcggaac

SEQ ID NO: 1556 - DNA, 20 bp, Artificial Sequence
  Synthetic
gcccgaggcaatctcggagg

SEQ ID NO: 1557 - DNA, 20 bp, Artificial Sequence
  Synthetic
ggcgcaacgagggcgaacaa

SEQ ID NO: 1558 - DNA, 20 bp, Artificial Sequence
  Synthetic
gtagcactactgcgcaacga

SEQ ID NO: 1559 - DNA, 20 bp, Artificial Sequence
  Synthetic
gtatatctccctggagatgg

SEQ ID NO: 1560 - DNA, 20 bp, Artificial Sequence
  Synthetic
gagggttagccgcgcaggtg

SEQ ID NO: 1561 - DNA, 20 bp, Artificial Sequence
  Synthetic
ggaactcccagtcagcgggt

SEQ ID NO: 1562 - DNA, 20 bp, Artificial Sequence
  Synthetic
gttgcgcaggcgcaatgctg

SEQ ID NO: 1563 - DNA, 20 bp, Artificial Sequence
  Synthetic
ggatctagtcctgcagtagg

SEQ ID NO: 1564 - DNA, 20 bp, Artificial Sequence
  Synthetic
ggcggcccggggccacaccg

SEQ ID NO: 1565 - DNA, 20 bp, Artificial Sequence
  Synthetic
gggccttgcactggcttggg

SEQ ID NO: 1566 - DNA, 20 bp, Artificial Sequence
  Synthetic
gagatcggagagtcggacac

SEQ ID NO: 1567 - DNA, 20 bp, Artificial Sequence
  Synthetic
ggaagcccggtctaactctc

SEQ ID NO: 1568 - DNA, 20 bp, Artificial Sequence
  Synthetic
ggtgtcggagatccgagagt

SEQ ID NO: 1569 - DNA, 20 bp, Artificial Sequence
  Synthetic
gacgtcccgcagccgctcca

SEQ ID NO: 1570 - DNA, 20 bp, Artificial Sequence
  Synthetic
gcggcgccggaggagacccg

SEQ ID NO: 1571 - DNA, 20 bp, Artificial Sequence
  Synthetic
ggggcgagaagacaccgggt

SEQ ID NO: 1572 - DNA, 20 bp, Artificial Sequence
  Synthetic
gctttggcttctctgagttg

SEQ ID NO: 1573 - DNA, 20 bp, Artificial Sequence
  Synthetic
ggagttggggttgtgtatag

SEQ ID NO: 1574 - DNA, 20 bp, Artificial Sequence
  Synthetic
ggcgctgggaattcagcttt

SEQ ID NO: 1575 - DNA, 20 bp, Artificial Sequence
  Synthetic
gccctcgccagggaccaggg

SEQ ID NO: 1576 - DNA, 20 bp, Artificial Sequence
  Synthetic
ggaggggcggagagccaccg

SEQ ID NO: 1577 - DNA, 20 bp, Artificial Sequence
  Synthetic
gttggttgccgcgagcgtgg

SEQ ID NO: 1578 - DNA, 20 bp, Artificial Sequence
  Synthetic
gccaccgccgggaatcacac

SEQ ID NO: 1579 - DNA, 20 bp, Artificial Sequence
  Synthetic
ggaagccctcgagctttcgt

SEQ ID NO: 1580 - DNA, 20 bp, Artificial Sequence
  Synthetic
ggagcccgtgtgattcccgg

SEQ ID NO: 1581 - DNA, 20 bp, Artificial Sequence
  Synthetic
gacttcgcgggagaagttgt

SEQ ID NO: 1582 - DNA, 20 bp, Artificial Sequence
  Synthetic
ggaatctgttatcgaggctc

SEQ ID NO: 1583 - DNA, 20 bp, Artificial Sequence
  Synthetic
gtgcaagaaggcgaagacag

SEQ ID NO: 1584 - DNA, 20 bp, Artificial Sequence
  Synthetic
gagaggaggcgcgagaatgg

SEQ ID NO: 1585 - DNA, 20 bp, Artificial Sequence
  Synthetic
gggaagaggaggcgcgagaa

SEQ ID NO: 1586 - DNA, 20 bp, Artificial Sequence
  Synthetic
gggaggcgcgagaatggagg

SEQ ID NO: 1587 - DNA, 20 bp, Artificial Sequence
  Synthetic
gccgatacttgtccacccag

SEQ ID NO: 1588 - DNA, 20 bp, Artificial Sequence
  Synthetic
gggacggctggactatcaca

SEQ ID NO: 1589 - DNA, 20 bp, Artificial Sequence
  Synthetic
gttgtccacccagaggctca

SEQ ID NO: 1590 - DNA, 20 bp, Artificial Sequence
  Synthetic
gacctcacaaggggcatcaa

SEQ ID NO: 1591 - DNA, 20 bp, Artificial Sequence
  Synthetic
gcgggaactgaggcgactgt

SEQ ID NO: 1592 - DNA, 20 bp, Artificial Sequence
  Synthetic
gcgttccgtggcgggaactg

SEQ ID NO: 1593 - DNA, 20 bp, Artificial Sequence
  Synthetic
ggggtctcagggtcaggtcg

SEQ ID NO: 1594 - DNA, 20 bp, Artificial Sequence
  Synthetic
gggtcactgtgcaggcgctt

SEQ ID NO: 1595 - DNA, 20 bp, Artificial Sequence
  Synthetic
gggtgacgcgacgatctcag

SEQ ID NO: 1596 - DNA, 20 bp, Artificial Sequence
  Synthetic
gcagttggcgtaggtgcatt

SEQ ID NO: 1597 - DNA, 20 bp, Artificial Sequence
  Synthetic
gcgtaggtgcattcggagtg

SEQ ID NO: 1598 - DNA, 20 bp, Artificial Sequence
  Synthetic
ggcttgagcggctccggaag

SEQ ID NO: 1599 - DNA, 20 bp, Artificial Sequence
  Synthetic
gaccgcaggccggcttgtgg

SEQ ID NO: 1600 - DNA, 20 bp, Artificial Sequence
  Synthetic
gcaggagctgcggccccgtc

SEQ ID NO: 1601 - DNA, 20 bp, Artificial Sequence
  Synthetic
gcgtccggcccgggctggta

SEQ ID NO: 1602 - DNA, 20 bp, Artificial Sequence
  Synthetic
gaagctgcccgggaaagtgg

SEQ ID NO: 1603 - DNA, 20 bp, Artificial Sequence
  Synthetic
ggagggaggagatcggcgga

SEQ ID NO: 1604 - DNA, 20 bp, Artificial Sequence
  Synthetic
ggcgagatgcctcgttcccc

SEQ ID NO: 1605 - DNA, 20 bp, Artificial Sequence
  Synthetic
ggagaaggcgaagaaggctg

SEQ ID NO: 1606 - DNA, 20 bp, Artificial Sequence
  Synthetic
ggccgaggagaaggcgaaga

SEQ ID NO: 1607 - DNA, 20 bp, Artificial Sequence
  Synthetic
ggctgtctgagcagcggttg

SEQ ID NO: 1608 - DNA, 20 bp, Artificial Sequence
  Synthetic
ggaagtgcggtgttgagcgc

SEQ ID NO: 1609 - DNA, 20 bp, Artificial Sequence
  Synthetic
ggcggccaaggcgactctgt

SEQ ID NO: 1610 - DNA, 20 bp, Artificial Sequence
  Synthetic
gggagagaaggggcccaaca

SEQ ID NO: 1611 - DNA, 20 bp, Artificial Sequence
  Synthetic
gagctggagagagacaatac

SEQ ID NO: 1612 - DNA, 20 bp, Artificial Sequence
  Synthetic
gaggcgaactcaggcgacag

SEQ ID NO: 1613 - DNA, 20 bp, Artificial Sequence
  Synthetic
gctcccctccctggccctag

SEQ ID NO: 1614 - DNA, 20 bp, Artificial Sequence
  Synthetic
gctggctgcgtaggagggac

SEQ ID NO: 1615 - DNA, 20 bp, Artificial Sequence
  Synthetic
ggcgcccgaaaggtgaacac

SEQ ID NO: 1616 - DNA, 20 bp, Artificial Sequence
  Synthetic
gtgcgctgccgcaacgaata

SEQ ID NO: 1617 - DNA, 20 bp, Artificial Sequence
  Synthetic
gccggcgccgccgcacaata

SEQ ID NO: 1618 - DNA, 20 bp, Artificial Sequence
  Synthetic
gcgcggccggagcaagactc

SEQ ID NO: 1619 - DNA, 20 bp, Artificial Sequence
  Synthetic
gtgaggctcgccatattgtg

SEQ ID NO: 1620 - DNA, 20 bp, Artificial Sequence
  Synthetic
gggcctggcacagtcctgtt

SEQ ID NO: 1621 - DNA, 20 bp, Artificial Sequence
  Synthetic
gtgcgagttctgttcccgcg

SEQ ID NO: 1622 - DNA, 20 bp, Artificial Sequence
  Synthetic
gtgtctccgccgcgggtcag

SEQ ID NO: 1623 - DNA, 20 bp, Artificial Sequence
  Synthetic
gggcggcggcatctttctcg

SEQ ID NO: 1624 - DNA, 20 bp, Artificial Sequence
  Synthetic
gttagggggaagacccgggc

SEQ ID NO: 1625 - DNA, 20 bp, Artificial Sequence
  Synthetic
gtttctcgaggagctctcct

SEQ ID NO: 1626 - DNA, 20 bp, Artificial Sequence
  Synthetic
gccggtgaaatccaagatgg

SEQ ID NO: 1627 - DNA, 20 bp, Artificial Sequence
  Synthetic
gcgtccggtgaaatccaaga

SEQ ID NO: 1628 - DNA, 20 bp, Artificial Sequence
  Synthetic
ggctaggctgaccctcctgc

SEQ ID NO: 1629 - DNA, 20 bp, Artificial Sequence
  Synthetic
gccgcgccggtggccggagc

SEQ ID NO: 1630 - DNA, 20 bp, Artificial Sequence
  Synthetic
gccggagctggtgcctgcgg

SEQ ID NO: 1631 - DNA, 20 bp, Artificial Sequence
  Synthetic
ggcagccagaacctaggtca

SEQ ID NO: 1632 - DNA, 20 bp, Artificial Sequence
  Synthetic
ggcgacgggggatgaacgcg

SEQ ID NO: 1633 - DNA, 20 bp, Artificial Sequence
  Synthetic
ggcggtgcgcgcaacttctc

SEQ ID NO: 1634 - DNA, 20 bp, Artificial Sequence
  Synthetic
gggaagctggagctgttgcg

SEQ ID NO: 1635 - DNA, 20 bp, Artificial Sequence
  Synthetic
gagccagagcggcgcagtgg

SEQ ID NO: 1636 - DNA, 20 bp, Artificial Sequence
  Synthetic
gagtagccagagcggcgcag

SEQ ID NO: 1637 - DNA, 20 bp, Artificial Sequence
  Synthetic
gcgctctggctacttttctc

SEQ ID NO: 1638 - DNA, 20 bp, Artificial Sequence
  Synthetic
ggaatcctgtgatcgcagaa

SEQ ID NO: 1639 - DNA, 20 bp, Artificial Sequence
  Synthetic
ggcgatcacaggattcccgg

SEQ ID NO: 1640 - DNA, 20 bp, Artificial Sequence
  Synthetic
ggcggctggcgggaaaccca

SEQ ID NO: 1641 - DNA, 20 bp, Artificial Sequence
  Synthetic
gaggcttcgagctgtccgaa

SEQ ID NO: 1642 - DNA, 20 bp, Artificial Sequence
  Synthetic
gctcaggctgaggagaaggt

SEQ ID NO: 1643 - DNA, 20 bp, Artificial Sequence
  Synthetic
gtcgtctggggctccacgga

SEQ ID NO: 1644 - DNA, 20 bp, Artificial Sequence
  Synthetic
ggaagcggccgggctggatc

SEQ ID NO: 1645 - DNA, 20 bp, Artificial Sequence
  Synthetic
gggagaaacccttaggccgc

SEQ ID NO: 1646 - DNA, 20 bp, Artificial Sequence
  Synthetic
ggtgctgtcgtagttggagg

SEQ ID NO: 1647 - DNA, 20 bp, Artificial Sequence
  Synthetic
gacgggtggcggccctcgac

SEQ ID NO: 1648 - DNA, 20 bp, Artificial Sequence
  Synthetic
gctggctgacagctggggac

SEQ ID NO: 1649 - DNA, 20 bp, Artificial Sequence
  Synthetic
ggccagctcagagttttcgc

SEQ ID NO: 1650 - DNA, 20 bp, Artificial Sequence
  Synthetic
gaacggccgcatggtaactc

SEQ ID NO: 1651 - DNA, 20 bp, Artificial Sequence
  Synthetic
gcgcatggtaactcaggcgc

SEQ ID NO: 1652 - DNA, 20 bp, Artificial Sequence
  Synthetic
gggccaggagaacgcgcgag

SEQ ID NO: 1653 - DNA, 20 bp, Artificial Sequence
  Synthetic
gcatgcacccacacttacaa

SEQ ID NO: 1654 - DNA, 20 bp, Artificial Sequence
  Synthetic
gtgcgctttacggaaacgag

SEQ ID NO: 1655 - DNA, 20 bp, Artificial Sequence
  Synthetic
gtggcagttggtgagcatca

SEQ ID NO: 1656 - DNA, 20 bp, Artificial Sequence
  Synthetic
gcggttggcttgagcgggac

SEQ ID NO: 1657 - DNA, 20 bp, Artificial Sequence
  Synthetic
gggaggcggcacagtatgac

SEQ ID NO: 1658 - DNA, 20 bp, Artificial Sequence
  Synthetic
gttgagcgggaccggagctg

SEQ ID NO: 1659 - DNA, 20 bp, Artificial Sequence
  Synthetic
gaaggggaattggtaaacca

SEQ ID NO: 1660 - DNA, 20 bp, Artificial Sequence
  Synthetic
gctgctgacatcctggatct

SEQ ID NO: 1661 - DNA, 20 bp, Artificial Sequence
  Synthetic
gtgaagtacatgggataatt

SEQ ID NO: 1662 - DNA, 20 bp, Artificial Sequence
  Synthetic
gagtctgcatcccaatatca

SEQ ID NO: 1663 - DNA, 20 bp, Artificial Sequence
  Synthetic
gctccagtctatcactgcag

SEQ ID NO: 1664 - DNA, 20 bp, Artificial Sequence
  Synthetic
ggcatcccaatatcaaggta

SEQ ID NO: 1665 - DNA, 20 bp, Artificial Sequence
  Synthetic
gcagccgcctccgaagatgg

SEQ ID NO: 1666 - DNA, 20 bp, Artificial Sequence
  Synthetic
ggaggccgcaggtccgaccg

SEQ ID NO: 1667 - DNA, 20 bp, Artificial Sequence
  Synthetic
ggcagctgcttcatcgggag

SEQ ID NO: 1668 - DNA, 20 bp, Artificial Sequence
  Synthetic
gacatccagctgctcagtcg

SEQ ID NO: 1669 - DNA, 20 bp, Artificial Sequence
  Synthetic
gacgacacggccttgtggga

SEQ ID NO: 1670 - DNA, 20 bp, Artificial Sequence
  Synthetic
ggcttgaggagaccacgtgg

SEQ ID NO: 1671 - DNA, 20 bp, Artificial Sequence
  Synthetic
gagagcggggcccggtatgg

SEQ ID NO: 1672 - DNA, 20 bp, Artificial Sequence
  Synthetic
gcctagagcggggcccggta

SEQ ID NO: 1673 - DNA, 20 bp, Artificial Sequence
  Synthetic
ggccgacgccagccagagag

SEQ ID NO: 1674 - DNA, 20 bp, Artificial Sequence
  Synthetic
gcggcggtagttccaggcga

SEQ ID NO: 1675 - DNA, 20 bp, Artificial Sequence
  Synthetic
gcggtagttccaggcgacgg

SEQ ID NO: 1676 - DNA, 20 bp, Artificial Sequence
  Synthetic
ggcgacggcggacggtggta

SEQ ID NO: 1677 - DNA, 20 bp, Artificial Sequence
  Synthetic
gccggatcccggaggacaga

SEQ ID NO: 1678 - DNA, 20 bp, Artificial Sequence
  Synthetic
gctgatggggcaaccgccaa

SEQ ID NO: 1679 - DNA, 20 bp, Artificial Sequence
  Synthetic
ggggcaaccgccaacggctg

SEQ ID NO: 1680 - DNA, 20 bp, Artificial Sequence
  Synthetic
ggactcaggcctccgtgtgg

SEQ ID NO: 1681 - DNA, 20 bp, Artificial Sequence
  Synthetic
ggcgtcggaggcggtagtga

SEQ ID NO: 1682 - DNA, 20 bp, Artificial Sequence
  Synthetic
gtcggaggcggtagtgacgg

SEQ ID NO: 1683 - DNA, 20 bp, Artificial Sequence
  Synthetic
ggcccggcagctaggcgctg

SEQ ID NO: 1684 - DNA, 20 bp, Artificial Sequence
  Synthetic
gtggagcccgggaagctcaa

SEQ ID NO: 1685 - DNA, 20 bp, Artificial Sequence
  Synthetic
gtggtttctgggtctcccgg

SEQ ID NO: 1686 - DNA, 20 bp, Artificial Sequence
  Synthetic
gagacgcgctcacctccggg

SEQ ID NO: 1687 - DNA, 20 bp, Artificial Sequence
  Synthetic
gaggatgtcggtgaattacg

SEQ ID NO: 1688 - DNA, 20 bp, Artificial Sequence
  Synthetic
gggcaagtgcggcctcccgg

SEQ ID NO: 1689 - DNA, 20 bp, Artificial Sequence
  Synthetic
gagacagagcgacttggtga

SEQ ID NO: 1690 - DNA, 20 bp, Artificial Sequence
  Synthetic
gctccacggcccgaaggggt

SEQ ID NO: 1691 - DNA, 20 bp, Artificial Sequence
  Synthetic
gtgatggagacagagcgact

SEQ ID NO: 1692 - DNA, 20 bp, Artificial Sequence
  Synthetic
gacaggagaggggcacgtac

SEQ ID NO: 1693 - DNA, 20 bp, Artificial Sequence
  Synthetic
ggctctcggggactatccgg

SEQ ID NO: 1694 - DNA, 20 bp, Artificial Sequence
  Synthetic
gcaagctctcggggactatc

SEQ ID NO: 1695 - DNA, 20 bp, Artificial Sequence
  Synthetic
ggggtgtagaagtccgaccg

SEQ ID NO: 1696 - DNA, 20 bp, Artificial Sequence
  Synthetic
ggtgcccctctcctgtctgg

SEQ ID NO: 1697 - DNA, 20 bp, Artificial Sequence
  Synthetic
gccgcggcggcgccggaggt

SEQ ID NO: 1698 - DNA, 20 bp, Artificial Sequence
  Synthetic
gcgttaagaaggtgccgcgg

SEQ ID NO: 1699 - DNA, 20 bp, Artificial Sequence
  Synthetic
gctgggagtcggcacccggg

SEQ ID NO: 1700 - DNA, 20 bp, Artificial Sequence
  Synthetic
gcccagagtacagaaacaga

SEQ ID NO: 1701 - DNA, 20 bp, Artificial Sequence
  Synthetic
gtactctgggtgactcagag

SEQ ID NO: 1702 - DNA, 20 bp, Artificial Sequence
  Synthetic
gttgctcgcgaggagtgtgc

SEQ ID NO: 1703 - DNA, 20 bp, Artificial Sequence
  Synthetic
ggccgccgccgccaaacgag

SEQ ID NO: 1704 - DNA, 20 bp, Artificial Sequence
  Synthetic
ggcttcccctcgtttggcgg

SEQ ID NO: 1705 - DNA, 20 bp, Artificial Sequence
  Synthetic
gggaggcgccgggaagtcga

SEQ ID NO: 1706 - DNA, 20 bp, Artificial Sequence
  Synthetic
ggccgtgaggtaagcgccgg

SEQ ID NO: 1707 - DNA, 20 bp, Artificial Sequence
  Synthetic
gggtggaacctagagccccg

SEQ ID NO: 1708 - DNA, 20 bp, Artificial Sequence
  Synthetic
gtggaaggcgcgctctcggg

SEQ ID NO: 1709 - DNA, 20 bp, Artificial Sequence
  Synthetic
gagaggtggagtgcatgcta

SEQ ID NO: 1710 - DNA, 20 bp, Artificial Sequence
  Synthetic
gatccgcccggaagttgacg

SEQ ID NO: 1711 - DNA, 20 bp, Artificial Sequence
  Synthetic
gcagctgagaggaagctgat

SEQ ID NO: 1712 - DNA, 20 bp, Artificial Sequence
  Synthetic
gaggcctggccgctacaata

SEQ ID NO: 1713 - DNA, 20 bp, Artificial Sequence
  Synthetic
gatccaagtggagatcgtag

SEQ ID NO: 1714 - DNA, 20 bp, Artificial Sequence
  Synthetic
gtgtagcggccaggcctgaa

SEQ ID NO: 1715 - DNA, 20 bp, Artificial Sequence
  Synthetic
ggccgccgcagacgacgacc

SEQ ID NO: 1716 - DNA, 20 bp, Artificial Sequence
  Synthetic
ggcctggtcgtcgtctgcgg

SEQ ID NO: 1717 - DNA, 20 bp, Artificial Sequence
  Synthetic
ggcggcctggtcgtcgtctg

SEQ ID NO: 1718 - DNA, 20 bp, Artificial Sequence
  Synthetic
gagaacctcggaacatacgg

SEQ ID NO: 1719 - DNA, 20 bp, Artificial Sequence
  Synthetic
gctagtcgcctccagagtga

SEQ ID NO: 1720 - DNA, 20 bp, Artificial Sequence
  Synthetic
ggagatacccctcactctgg

SEQ ID NO: 1721 - DNA, 20 bp, Artificial Sequence
  Synthetic
gacgccacgagggacaacaa

SEQ ID NO: 1722 - DNA, 20 bp, Artificial Sequence
  Synthetic
ggccaggctgtggggacgac

SEQ ID NO: 1723 - DNA, 20 bp, Artificial Sequence
  Synthetic
gggtgcgcgcgggaacgacc

SEQ ID NO: 1724 - DNA, 20 bp, Artificial Sequence
  Synthetic
gacgttgtcgaactgggtca

SEQ ID NO: 1725 - DNA, 20 bp, Artificial Sequence
  Synthetic
gcccgagccggagaagatgg

SEQ ID NO: 1726 - DNA, 20 bp, Artificial Sequence
  Synthetic
ggggcgggacaaagggaccg

SEQ ID NO: 1727 - DNA, 20 bp, Artificial Sequence
  Synthetic
gctcagggcagcgagactat

SEQ ID NO: 1728 - DNA, 20 bp, Artificial Sequence
  Synthetic
ggatagagcggggcgactag

SEQ ID NO: 1729 - DNA, 20 bp, Artificial Sequence
  Synthetic
ggccggccggccggcacggg

SEQ ID NO: 1730 - DNA, 20 bp, Artificial Sequence
  Synthetic
ggacgggacggagcgatgtc

SEQ ID NO: 1731 - DNA, 20 bp, Artificial Sequence
  Synthetic
ggagcccggagtccggatcg

SEQ ID NO: 1732 - DNA, 20 bp, Artificial Sequence
  Synthetic
ggcacggagtggactcgacg

SEQ ID NO: 1733 - DNA, 20 bp, Artificial Sequence
  Synthetic
gaagctccggacgcgagggg

SEQ ID NO: 1734 - DNA, 20 bp, Artificial Sequence
  Synthetic
gcttggaaacactcacccgc

SEQ ID NO: 1735 - DNA, 20 bp, Artificial Sequence
  Synthetic
gggggcgagcgcgggacaaa

SEQ ID NO: 1736 - DNA, 20 bp, Artificial Sequence
  Synthetic
ggccgtacgcccgagaactg

SEQ ID NO: 1737 - DNA, 20 bp, Artificial Sequence
  Synthetic
ggaactgaggtagcccgcgc

SEQ ID NO: 1738 - DNA, 20 bp, Artificial Sequence
  Synthetic
ggcgccggcggcagtaggac

SEQ ID NO: 1739 - DNA, 20 bp, Artificial Sequence
  Synthetic
gcgcgggcgcttgataacgc

SEQ ID NO: 1740 - DNA, 20 bp, Artificial Sequence
  Synthetic
gtaacgcgggtgaggcgtgg

SEQ ID NO: 1741 - DNA, 20 bp, Artificial Sequence
  Synthetic
gtgataacgcgggtgaggcg

SEQ ID NO: 1742 - DNA, 20 bp, Artificial Sequence
  Synthetic
gaagtctggcccggcccaac

SEQ ID NO: 1743 - DNA, 20 bp, Artificial Sequence
  Synthetic
ggcgggtgttgagagcggtg

SEQ ID NO: 1744 - DNA, 20 bp, Artificial Sequence
  Synthetic
ggtgcgtgagcacggccggt

SEQ ID NO: 1745 - DNA, 20 bp, Artificial Sequence
  Synthetic
gcagcaaccgcacggccgca

SEQ ID NO: 1746 - DNA, 20 bp, Artificial Sequence
  Synthetic
gccccggagcagcaaccgca

SEQ ID NO: 1747 - DNA, 20 bp, Artificial Sequence
  Synthetic
ggtccagcctgtggagacag

SEQ ID NO: 1748 - DNA, 20 bp, Artificial Sequence
  Synthetic
gccggagccgaaacaccggt

SEQ ID NO: 1749 - DNA, 20 bp, Artificial Sequence
  Synthetic
gccggtaggagcggggaggt

SEQ ID NO: 1750 - DNA, 20 bp, Artificial Sequence
  Synthetic
gggacccggagccgaaacac

SEQ ID NO: 1751 - DNA, 20 bp, Artificial Sequence
  Synthetic
gaatttctatgtatccagaa

SEQ ID NO: 1752 - DNA, 20 bp, Artificial Sequence
  Synthetic
gatggtccaagtcaattcca

SEQ ID NO: 1753 - DNA, 20 bp, Artificial Sequence
  Synthetic
gcttctgtctatcacataag

SEQ ID NO: 1754 - DNA, 20 bp, Artificial Sequence
  Synthetic
gcggcggcaccaagtatccg

SEQ ID NO: 1755 - DNA, 20 bp, Artificial Sequence
  Synthetic
ggccagtcattccagctccg

SEQ ID NO: 1756 - DNA, 20 bp, Artificial Sequence
  Synthetic
gttccagctccgcggatact

SEQ ID NO: 1757 - DNA, 20 bp, Artificial Sequence
  Synthetic
gaaggaaccggaaacgggat

SEQ ID NO: 1758 - DNA, 20 bp, Artificial Sequence
  Synthetic
gggaccaggtgaggaagtag

SEQ ID NO: 1759 - DNA, 20 bp, Artificial Sequence
  Synthetic
gtgggaatccgggactgtgg

SEQ ID NO: 1760 - DNA, 20 bp, Artificial Sequence
  Synthetic
gaagatggcgctcaccaggt

SEQ ID NO: 1761 - DNA, 20 bp, Artificial Sequence
  Synthetic
gtcgctcgcgctggaagaag

SEQ ID NO: 1762 - DNA, 20 bp, Artificial Sequence
  Synthetic
ggagcgggtgaactaaaccc

SEQ ID NO: 1763 - DNA, 20 bp, Artificial Sequence
  Synthetic
gccccgtacggataccggaa

SEQ ID NO: 1764 - DNA, 20 bp, Artificial Sequence
  Synthetic
gccggaaaggctggatacct

SEQ ID NO: 1765 - DNA, 20 bp, Artificial Sequence
  Synthetic
ggaagagaacctcccccgta

SEQ ID NO: 1766 - DNA, 20 bp, Artificial Sequence
  Synthetic
gaagggcgcagcctaggaca

SEQ ID NO: 1767 - DNA, 20 bp, Artificial Sequence
  Synthetic
gacgaggcctcgggccccat

SEQ ID NO: 1768 - DNA, 20 bp, Artificial Sequence
  Synthetic
ggcacgcagccacgccccaa

SEQ ID NO: 1769 - DNA, 20 bp, Artificial Sequence
  Synthetic
gaccccaagccgcctagccg

SEQ ID NO: 1770 - DNA, 20 bp, Artificial Sequence
  Synthetic
gatctcctaggagctagtcc

SEQ ID NO: 1771 - DNA, 20 bp, Artificial Sequence
  Synthetic
ggagatgccggctctcgaga

SEQ ID NO: 1772 - DNA, 20 bp, Artificial Sequence
  Synthetic
gagcatttccgggcctcctg

SEQ ID NO: 1773 - DNA, 20 bp, Artificial Sequence
  Synthetic
ggattccgagcgagtggtgg

SEQ ID NO: 1774 - DNA, 20 bp, Artificial Sequence
  Synthetic
gtcagtccgtcgggagggct

SEQ ID NO: 1775 - DNA, 20 bp, Artificial Sequence
  Synthetic
gcggcagagcgagcccgcag

SEQ ID NO: 1776 - DNA, 20 bp, Artificial Sequence
  Synthetic
ggctcggcgcacggatatgg

SEQ ID NO: 1777 - DNA, 20 bp, Artificial Sequence
  Synthetic
gggagacgtggtgccgctgc

SEQ ID NO: 1778 - DNA, 20 bp, Artificial Sequence
  Synthetic
gcgggtgaacggcaaactgg

SEQ ID NO: 1779 - DNA, 20 bp, Artificial Sequence
  Synthetic
ggacttgccgatagtggtga

SEQ ID NO: 1780 - DNA, 20 bp, Artificial Sequence
  Synthetic
ggctcgggacttgccgatag

SEQ ID NO: 1781 - DNA, 20 bp, Artificial Sequence
  Synthetic
gctgctcgggttagatcgtc

SEQ ID NO: 1782 - DNA, 20 bp, Artificial Sequence
  Synthetic
gggacaccctttaccgaaga

SEQ ID NO: 1783 - DNA, 20 bp, Artificial Sequence
  Synthetic
ggggttagatcgtcaggtga

SEQ ID NO: 1784 - DNA, 20 bp, Artificial Sequence
  Synthetic
gcacgcgggaaaagcttccc

SEQ ID NO: 1785 - DNA, 20 bp, Artificial Sequence
  Synthetic
gcctctctgtggcctgtgta

SEQ ID NO: 1786 - DNA, 20 bp, Artificial Sequence
  Synthetic
ggcctgtgtacggcttccgg

SEQ ID NO: 1787 - DNA, 20 bp, Artificial Sequence
  Synthetic
gatcctaacccgccatctgg

SEQ ID NO: 1788 - DNA, 20 bp, Artificial Sequence
  Synthetic
gcaccgcggccagcagaggg

SEQ ID NO: 1789 - DNA, 20 bp, Artificial Sequence
  Synthetic
gtgccaccagatggcgggtt

SEQ ID NO: 1790 - DNA, 20 bp, Artificial Sequence
  Synthetic
gaactgctggggaaggcgat

SEQ ID NO: 1791 - DNA, 20 bp, Artificial Sequence
  Synthetic
gagtcgggcctcggaaggga

SEQ ID NO: 1792 - DNA, 20 bp, Artificial Sequence
  Synthetic
gcgcgctggagatgatgggg

SEQ ID NO: 1793 - DNA, 20 bp, Artificial Sequence
  Synthetic
gcaccctcgaattctactca

SEQ ID NO: 1794 - DNA, 20 bp, Artificial Sequence
  Synthetic
ggtccctgagtagaattcga

SEQ ID NO: 1795 - DNA, 20 bp, Artificial Sequence
  Synthetic
gtcagggacggaagctcccg

SEQ ID NO: 1796 - DNA, 20 bp, Artificial Sequence
  Synthetic
gcccgccgctgcccttccgg

SEQ ID NO: 1797 - DNA, 20 bp, Artificial Sequence
  Synthetic
ggaatctttcgcccccggaa

SEQ ID NO: 1798 - DNA, 20 bp, Artificial Sequence
  Synthetic
ggcccccggaagggcagcgg

SEQ ID NO: 1799 - DNA, 20 bp, Artificial Sequence
  Synthetic
gcgacccgggagaaagaagt

SEQ ID NO: 1800 - DNA, 20 bp, Artificial Sequence
  Synthetic
gcgggctgggagccatccaa

SEQ ID NO: 1801 - DNA, 20 bp, Artificial Sequence
  Synthetic
ggaagtgacgcgaggcgtag

SEQ ID NO: 1802 - DNA, 20 bp, Artificial Sequence
  Synthetic
gcgaggcgccagccaatggg

SEQ ID NO: 1803 - DNA, 20 bp, Artificial Sequence
  Synthetic
ggccgcggccggccccgtgg

SEQ ID NO: 1804 - DNA, 20 bp, Artificial Sequence
  Synthetic
ggctttcccgggccccccac

SEQ ID NO: 1805 - DNA, 20 bp, Artificial Sequence
  Synthetic
gcttgggcgggcccacttag

SEQ ID NO: 1806 - DNA, 20 bp, Artificial Sequence
  Synthetic
ggccccgcgcacagttgcgg

SEQ ID NO: 1807 - DNA, 20 bp, Artificial Sequence
  Synthetic
gttaggggcggggctctaga

SEQ ID NO: 1808 - DNA, 20 bp, Artificial Sequence
  Synthetic
gcgagaatcacgcgaggtcc

SEQ ID NO: 1809 - DNA, 20 bp, Artificial Sequence
  Synthetic
gcgggtcattgggagagtgc

SEQ ID NO: 1810 - DNA, 20 bp, Artificial Sequence
  Synthetic
gtgggagagtgcgggattcc

SEQ ID NO: 1811 - DNA, 20 bp, Artificial Sequence
  Synthetic
gaggctccggcggaccgagg

SEQ ID NO: 1812 - DNA, 20 bp, Artificial Sequence
  Synthetic
gccggcggaccgagggggga

SEQ ID NO: 1813 - DNA, 20 bp, Artificial Sequence
  Synthetic
gccggcgggtagctggcggg

SEQ ID NO: 1814 - DNA, 20 bp, Artificial Sequence
  Synthetic
gcgggcggctggcagttcaa

SEQ ID NO: 1815 - DNA, 20 bp, Artificial Sequence
  Synthetic
gtgagcggcccggagcgcgt

SEQ ID NO: 1816 - DNA, 20 bp, Artificial Sequence
  Synthetic
gtgctacatacggtctatga

SEQ ID NO: 1817 - DNA, 20 bp, Artificial Sequence
  Synthetic
gcgacgctcggcggcatagg

SEQ ID NO: 1818 - DNA, 20 bp, Artificial Sequence
  Synthetic
gcggctccaccgacactacg

SEQ ID NO: 1819 - DNA, 20 bp, Artificial Sequence
  Synthetic
gggaggcgtccgcgtagtgt

SEQ ID NO: 1820 - DNA, 20 bp, Artificial Sequence
  Synthetic
gcacaagcgcgcttcacctg

SEQ ID NO: 1821 - DNA, 20 bp, Artificial Sequence
  Synthetic
gcgcgcttgtggaggagttg

SEQ ID NO: 1822 - DNA, 20 bp, Artificial Sequence
  Synthetic
ggcggagaaggggccacctc

SEQ ID NO: 1823 - DNA, 20 bp, Artificial Sequence
  Synthetic
gacctacccgacatgactaa

SEQ ID NO: 1824 - DNA, 20 bp, Artificial Sequence
  Synthetic
ggccgccctcagtacagctc

SEQ ID NO: 1825 - DNA, 20 bp, Artificial Sequence
  Synthetic
gggcggccggagctgtactg

SEQ ID NO: 1826 - DNA, 20 bp, Artificial Sequence
  Synthetic
gactgcagatcgctggtgag

SEQ ID NO: 1827 - DNA, 20 bp, Artificial Sequence
  Synthetic
ggcttcgttcgtaaggaagg

SEQ ID NO: 1828 - DNA, 20 bp, Artificial Sequence
  Synthetic
gttacgaacgaagcccgcgg

SEQ ID NO: 1829 - DNA, 20 bp, Artificial Sequence
  Synthetic
ggagacctgggcccgatggc

SEQ ID NO: 1830 - DNA, 20 bp, Artificial Sequence
  Synthetic
ggctggcagtacccagacag

SEQ ID NO: 1831 - DNA, 20 bp, Artificial Sequence
  Synthetic
gtctgggtactgccagccat

SEQ ID NO: 1832 - DNA, 20 bp, Artificial Sequence
  Synthetic
gcgggatccgaggcaagcgt

SEQ ID NO: 1833 - DNA, 20 bp, Artificial Sequence
  Synthetic
ggccgaaggggcgggatccg

SEQ ID NO: 1834 - DNA, 20 bp, Artificial Sequence
  Synthetic
ggccgcccaacacgtacctg

SEQ ID NO: 1835 - DNA, 20 bp, Artificial Sequence
  Synthetic
ggctccaccgacctaggtaa

SEQ ID NO: 1836 - DNA, 20 bp, Artificial Sequence
  Synthetic
gggcggcaggaagatggagt

SEQ ID NO: 1837 - DNA, 20 bp, Artificial Sequence
  Synthetic
gtaaaggggcggtgcagagg

SEQ ID NO: 1838 - DNA, 20 bp, Artificial Sequence
  Synthetic
ggccccgagcacgagttcct

SEQ ID NO: 1839 - DNA, 20 bp, Artificial Sequence
  Synthetic
ggcctctcagcgcgaatctg

SEQ ID NO: 1840 - DNA, 20 bp, Artificial Sequence
  Synthetic
ggtccgggcgaggctcccgc

SEQ ID NO: 1841 - DNA, 20 bp, Artificial Sequence
  Synthetic
gagcgagccatttaacatgg

SEQ ID NO: 1842 - DNA, 20 bp, Artificial Sequence
  Synthetic
gcgttgctcggcgcctgaag

SEQ ID NO: 1843 - DNA, 20 bp, Artificial Sequence
  Synthetic
ggcggaggatgtttcctcag

SEQ ID NO: 1844 - DNA, 20 bp, Artificial Sequence
  Synthetic
gagtagcgacggcagcgggc

SEQ ID NO: 1845 - DNA, 20 bp, Artificial Sequence
  Synthetic
gatggccgcgggagccggga

SEQ ID NO: 1846 - DNA, 20 bp, Artificial Sequence
  Synthetic
ggaggaggcgggagtagcga

SEQ ID NO: 1847 - DNA, 20 bp, Artificial Sequence
  Synthetic
gaactgaagagcggcggcgt

SEQ ID NO: 1848 - DNA, 20 bp, Artificial Sequence
  Synthetic
gcgggcaaactgaagagcgg

SEQ ID NO: 1849 - DNA, 20 bp, Artificial Sequence
  Synthetic
gggcgtcggagacatcttct

SEQ ID NO: 1850 - DNA, 20 bp, Artificial Sequence
  Synthetic
gctgcactctcacctgtagt

SEQ ID NO: 1851 - DNA, 20 bp, Artificial Sequence
  Synthetic
ggagtttcgaactcggggag

SEQ ID NO: 1852 - DNA, 20 bp, Artificial Sequence
  Synthetic
gggcttctgctactagtgag

SEQ ID NO: 1853 - DNA, 20 bp, Artificial Sequence
  Synthetic
gagcaagacgcgcgagttcc

SEQ ID NO: 1854 - DNA, 20 bp, Artificial Sequence
  Synthetic
gcaccttggcgctgtgcgcc

SEQ ID NO: 1855 - DNA, 20 bp, Artificial Sequence
  Synthetic
gccacggggccatcgagccg

SEQ ID NO: 1856 - DNA, 20 bp, Artificial Sequence
  Synthetic
gccggggaccgcgggtagtg

SEQ ID NO: 1857 - DNA, 20 bp, Artificial Sequence
  Synthetic
gcctcacagctccaagaacc

SEQ ID NO: 1858 - DNA, 20 bp, Artificial Sequence
  Synthetic
ggggagtaagccactgccgg

SEQ ID NO: 1859 - DNA, 20 bp, Artificial Sequence
  Synthetic
gaggccttacgtgcctagag

SEQ ID NO: 1860 - DNA, 20 bp, Artificial Sequence
  Synthetic
gcgcgggcgcggaagacggg

SEQ ID NO: 1861 - DNA, 20 bp, Artificial Sequence
  Synthetic
ggcgcccgcgcagaacctcg

SEQ ID NO: 1862 - DNA, 20 bp, Artificial Sequence
  Synthetic
gccatgggagccgtgactga

SEQ ID NO: 1863 - DNA, 20 bp, Artificial Sequence
  Synthetic
gcgcaagctgaggcggcggt

SEQ ID NO: 1864 - DNA, 20 bp, Artificial Sequence
  Synthetic
ggcggcggcgcaagctgagg

SEQ ID NO: 1865 - DNA, 20 bp, Artificial Sequence
  Synthetic
gaacggagcccgctcagaag

SEQ ID NO: 1866 - DNA, 20 bp, Artificial Sequence
  Synthetic
gcgctgggcgcgctgtgggg

SEQ ID NO: 1867 - DNA, 20 bp, Artificial Sequence
  Synthetic
ggctgcagctgcgatctctg

SEQ ID NO: 1868 - DNA, 20 bp, Artificial Sequence
  Synthetic
gaacgcggcgcgggagacta

SEQ ID NO: 1869 - DNA, 20 bp, Artificial Sequence
  Synthetic
gagaagcccggaggagccac

SEQ ID NO: 1870 - DNA, 20 bp, Artificial Sequence
  Synthetic
gccggtgagacccgggaacg

SEQ ID NO: 1871 - DNA, 20 bp, Artificial Sequence
  Synthetic
gcacctcacgcagaaaacac

SEQ ID NO: 1872 - DNA, 20 bp, Artificial Sequence
  Synthetic
ggcgatactcgggaactcct

SEQ ID NO: 1873 - DNA, 20 bp, Artificial Sequence
  Synthetic
gggaactcctggggcgagaa

SEQ ID NO: 1874 - DNA, 20 bp, Artificial Sequence
  Synthetic
gctcggatcgccgcgggatc

SEQ ID NO: 1875 - DNA, 20 bp, Artificial Sequence
  Synthetic
ggcttcgccgtaagttcctc

SEQ ID NO: 1876 - DNA, 20 bp, Artificial Sequence
  Synthetic
gggggtccccgaggaactta

SEQ ID NO: 1877 - DNA, 20 bp, Artificial Sequence
  Synthetic
gacgctgcctgactgccggg

SEQ ID NO: 1878 - DNA, 20 bp, Artificial Sequence
  Synthetic
gaggtggtccccactcatgt

SEQ ID NO: 1879 - DNA, 20 bp, Artificial Sequence
  Synthetic
gtcaggcagcgtcgccgccg

SEQ ID NO: 1880 - DNA, 20 bp, Artificial Sequence
  Synthetic
gacgcgcgtctgtggagaag

SEQ ID NO: 1881 - DNA, 20 bp, Artificial Sequence
  Synthetic
gggagaagcggcttggtcgg

SEQ ID NO: 1882 - DNA, 20 bp, Artificial Sequence
  Synthetic
gggcggccagagagatgccc

SEQ ID NO: 1883 - DNA, 20 bp, Artificial Sequence
  Synthetic
gagggaggtgaccgtggcgg

SEQ ID NO: 1884 - DNA, 20 bp, Artificial Sequence
  Synthetic
gggtgttatgccggacaaga

SEQ ID NO: 1885 - DNA, 20 bp, Artificial Sequence
  Synthetic
gtttgcacaccggggagaga

SEQ ID NO: 1886 - DNA, 20 bp, Artificial Sequence
  Synthetic
gaagttccacgccaagatac

SEQ ID NO: 1887 - DNA, 20 bp, Artificial Sequence
  Synthetic
gactggattcggtgctgagg

SEQ ID NO: 1888 - DNA, 20 bp, Artificial Sequence
  Synthetic
gtcagtgactgaagctccaa

SEQ ID NO: 1889 - DNA, 20 bp, Artificial Sequence
  Synthetic
gcgcaccgcggatccagctc

SEQ ID NO: 1890 - DNA, 20 bp, Artificial Sequence
  Synthetic
gcggctggacccggaaatag

SEQ ID NO: 1891 - DNA, 20 bp, Artificial Sequence
  Synthetic
gggtagccgccccgggaaca

SEQ ID NO: 1892 - DNA, 20 bp, Artificial Sequence
  Synthetic
gggcatcgcgaaccccagtt

SEQ ID NO: 1893 - DNA, 20 bp, Artificial Sequence
  Synthetic
gggctccaacgaggtaagtg

SEQ ID NO: 1894 - DNA, 20 bp, Artificial Sequence
  Synthetic
gtctccgggcggcgagtcgg

SEQ ID NO: 1895 - DNA, 20 bp, Artificial Sequence
  Synthetic
gaagaggcggagtcgaggtg

SEQ ID NO: 1896 - DNA, 20 bp, Artificial Sequence
  Synthetic
gcgcctgggaggttactgta

SEQ ID NO: 1897 - DNA, 20 bp, Artificial Sequence
  Synthetic
gcgtatcctccaggaagagg

SEQ ID NO: 1898 - DNA, 20 bp, Artificial Sequence
  Synthetic
gagtctagagccaccgtcca

SEQ ID NO: 1899 - DNA, 20 bp, Artificial Sequence
  Synthetic
gcagggagcaggtagctgct

SEQ ID NO: 1900 - DNA, 20 bp, Artificial Sequence
  Synthetic
ggagccaccgtccagggagc

SEQ ID NO: 1901 - DNA, 20 bp, Artificial Sequence
  Synthetic
gacctagggatcgatctgga

SEQ ID NO: 1902 - DNA, 20 bp, Artificial Sequence
  Synthetic
gggcgacctagggatcgatc

SEQ ID NO: 1903 - DNA, 20 bp, Artificial Sequence
  Synthetic
gtggcgacagcggcgaccta

SEQ ID NO: 1904 - DNA, 20 bp, Artificial Sequence
  Synthetic
gagccttccagagcactccc

SEQ ID NO: 1905 - DNA, 20 bp, Artificial Sequence
  Synthetic
gaggctgcgcagtattggag

SEQ ID NO: 1906 - DNA, 20 bp, Artificial Sequence
  Synthetic
gtgcccgaggtctccatcct

SEQ ID NO: 1907 - DNA, 20 bp, Artificial Sequence
  Synthetic
gccggccgggccccctgacg

SEQ ID NO: 1908 - DNA, 20 bp, Artificial Sequence
  Synthetic
gggattagttggtttcggag

SEQ ID NO: 1909 - DNA, 20 bp, Artificial Sequence
  Synthetic
ggtctcttcgacgctcgtga

SEQ ID NO: 1910 - DNA, 20 bp, Artificial Sequence
  Synthetic
ggccctgggccggagaaccc

SEQ ID NO: 1911 - DNA, 20 bp, Artificial Sequence
  Synthetic
ggcttgtgcgcggaaccgag

SEQ ID NO: 1912 - DNA, 20 bp, Artificial Sequence
  Synthetic
gggtaagccccggccgcgca

SEQ ID NO: 1913 - DNA, 20 bp, Artificial Sequence
  Synthetic
gcaggcaggcagtagtgact

SEQ ID NO: 1914 - DNA, 20 bp, Artificial Sequence
  Synthetic
gctcaccgtagcaggcaggc

SEQ ID NO: 1915 - DNA, 20 bp, Artificial Sequence
  Synthetic
gtcggctgcacactctcccg

SEQ ID NO: 1916 - DNA, 20 bp, Artificial Sequence
  Synthetic
gcggctcggagcgcgaaaca

SEQ ID NO: 1917 - DNA, 20 bp, Artificial Sequence
  Synthetic
gggcggcgacgactactcag

SEQ ID NO: 1918 - DNA, 20 bp, Artificial Sequence
  Synthetic
ggcgcagccggaaccggcga

SEQ ID NO: 1919 - DNA, 20 bp, Artificial Sequence
  Synthetic
gcggccgagcggttgcgacg

SEQ ID NO: 1920 - DNA, 20 bp, Artificial Sequence
  Synthetic
ggcaggccgcacccacttgg

SEQ ID NO: 1921 - DNA, 20 bp, Artificial Sequence
  Synthetic
gtgcgacgagggctcggctg

SEQ ID NO: 1922 - DNA, 20 bp, Artificial Sequence
  Synthetic
ggcgggacaaccacgagccg

SEQ ID NO: 1923 - DNA, 20 bp, Artificial Sequence
  Synthetic
gggacaaccacgagccgcgg

SEQ ID NO: 1924 - DNA, 20 bp, Artificial Sequence
  Synthetic
gtcccgccatggcactgtcg

SEQ ID NO: 1925 - DNA, 20 bp, Artificial Sequence
  Synthetic
gccgaccctcgacttcggag

SEQ ID NO: 1926 - DNA, 20 bp, Artificial Sequence
  Synthetic
ggaggcagcgcggttcctct

SEQ ID NO: 1927 - DNA, 20 bp, Artificial Sequence
  Synthetic
ggggaggcggaagcacccag

SEQ ID NO: 1928 - DNA, 20 bp, Artificial Sequence
  Synthetic
ggagcatgtcgaccccggcc

SEQ ID NO: 1929 - DNA, 20 bp, Artificial Sequence
  Synthetic
ggcccggaggaggctcatgc

SEQ ID NO: 1930 - DNA, 20 bp, Artificial Sequence
  Synthetic
gggaaccgcgccccgctgaa

SEQ ID NO: 1931 - DNA, 20 bp, Artificial Sequence
  Synthetic
gagggaagtcccgagacaaa

SEQ ID NO: 1932 - DNA, 20 bp, Artificial Sequence
  Synthetic
ggagcgtagcggacaggtgg

SEQ ID NO: 1933 - DNA, 20 bp, Artificial Sequence
  Synthetic
gggacaggtggaggaccgag

SEQ ID NO: 1934 - DNA, 20 bp, Artificial Sequence
  Synthetic
gacgcacgagtggaagtccc

SEQ ID NO: 1935 - DNA, 20 bp, Artificial Sequence
  Synthetic
gcctgcccgcgacggtggta

SEQ ID NO: 1936 - DNA, 20 bp, Artificial Sequence
  Synthetic
gtgcgtgaggcgagaggagc

SEQ ID NO: 1937 - DNA, 20 bp, Artificial Sequence
  Synthetic
gagcaacgcgcggaccaacg

SEQ ID NO: 1938 - DNA, 20 bp, Artificial Sequence
  Synthetic
gcaacagtcagaggtcgcgc

SEQ ID NO: 1939 - DNA, 20 bp, Artificial Sequence
  Synthetic
ggagaccctccgctcaacag

SEQ ID NO: 1940 - DNA, 20 bp, Artificial Sequence
  Synthetic
gaaatcacgcagcccggccc

SEQ ID NO: 1941 - DNA, 20 bp, Artificial Sequence
  Synthetic
gcggcccgggaaccgacctg

SEQ ID NO: 1942 - DNA, 20 bp, Artificial Sequence
  Synthetic
ggatggcggtctccacaggt

SEQ ID NO: 1943 - DNA, 20 bp, Artificial Sequence
  Synthetic
gaagcgcccgcggtctgagg

SEQ ID NO: 1944 - DNA, 20 bp, Artificial Sequence
  Synthetic
ggtcacgagccgaagggagg

SEQ ID NO: 1945 - DNA, 20 bp, Artificial Sequence
  Synthetic
ggttgtcacgagccgaaggg

SEQ ID NO: 1946 - DNA, 20 bp, Artificial Sequence
  Synthetic
gccggcggcagctggtgcgg

SEQ ID NO: 1947 - DNA, 20 bp, Artificial Sequence
  Synthetic
ggacgtgtggttgacgagct

SEQ ID NO: 1948 - DNA, 20 bp, Artificial Sequence
  Synthetic
ggtgtggttgacgagctcgg

SEQ ID NO: 1949 - DNA, 20 bp, Artificial Sequence
  Synthetic
gaaaccccacccgagatccg

SEQ ID NO: 1950 - DNA, 20 bp, Artificial Sequence
  Synthetic
gcccgccgccgggactacag

SEQ ID NO: 1951 - DNA, 20 bp, Artificial Sequence
  Synthetic
ggtgctgcggagccaataag

SEQ ID NO: 1952 - DNA, 20 bp, Artificial Sequence
  Synthetic
gccacacgttgggagcgcgg

SEQ ID NO: 1953 - DNA, 20 bp, Artificial Sequence
  Synthetic
gcgtcgcgagagacacaccc

SEQ ID NO: 1954 - DNA, 20 bp, Artificial Sequence
  Synthetic
gcgtcgggagaggcctacct

SEQ ID NO: 1955 - DNA, 20 bp, Artificial Sequence
  Synthetic
gccccgagccggccgtccag

SEQ ID NO: 1956 - DNA, 20 bp, Artificial Sequence
  Synthetic
gcgccacccgggaaccggcg

SEQ ID NO: 1957 - DNA, 20 bp, Artificial Sequence
  Synthetic
ggtcgcttcctggcggggct

SEQ ID NO: 1958 - DNA, 20 bp, Artificial Sequence
  Synthetic
ggagcggctggcggcttcga

SEQ ID NO: 1959 - DNA, 20 bp, Artificial Sequence
  Synthetic
ggcccgagggccctacccgg

SEQ ID NO: 1960 - DNA, 20 bp, Artificial Sequence
  Synthetic
gttcgaggggagctgaggcg

SEQ ID NO: 1961 - DNA, 20 bp, Artificial Sequence
  Synthetic
gccaggagcgcaacaagcag

SEQ ID NO: 1962 - DNA, 20 bp, Artificial Sequence
  Synthetic
gccgaacgcctgaaccgcta

SEQ ID NO: 1963 - DNA, 20 bp, Artificial Sequence
  Synthetic
gcgcgccaagttcccctcgg

SEQ ID NO: 1964 - DNA, 20 bp, Artificial Sequence
  Synthetic
gaccccctgtcccgcccggc

SEQ ID NO: 1965 - DNA, 20 bp, Artificial Sequence
  Synthetic
ggagaccggtgacccgcggc

SEQ ID NO: 1966 - DNA, 20 bp, Artificial Sequence
  Synthetic
ggcgggagaccggtgacccg

SEQ ID NO: 1967 - DNA, 20 bp, Artificial Sequence
  Synthetic
gaatgtcacatccgcatggg

SEQ ID NO: 1968 - DNA, 20 bp, Artificial Sequence
  Synthetic
gagcgaggagagcaagcggg

SEQ ID NO: 1969 - DNA, 20 bp, Artificial Sequence
  Synthetic
gctcctcggcgtcgtcgtcg

SEQ ID NO: 1970 - DNA, 20 bp, Artificial Sequence
  Synthetic
gagagccccggggaccgaac

SEQ ID NO: 1971 - DNA, 20 bp, Artificial Sequence
  Synthetic
ggccgcgtcagcggtaggtg

SEQ ID NO: 1972 - DNA, 20 bp, Artificial Sequence
  Synthetic
gtggttacgctgccgggcgg

SEQ ID NO: 1973 - DNA, 20 bp, Artificial Sequence
  Synthetic
gccaaaaccgagctggtgag

SEQ ID NO: 1974 - DNA, 20 bp, Artificial Sequence
  Synthetic
gccccggacaaagaagaaga

SEQ ID NO: 1975 - DNA, 20 bp, Artificial Sequence
  Synthetic
ggtggcggcgcagtctcggt

SEQ ID NO: 1976 - DNA, 20 bp, Artificial Sequence
  Synthetic
gactgtgggaagcggagtga

SEQ ID NO: 1977 - DNA, 20 bp, Artificial Sequence
  Synthetic
gagcggagtgacggagcgag

SEQ ID NO: 1978 - DNA, 20 bp, Artificial Sequence
  Synthetic
gtgagagccgagagaggcga

SEQ ID NO: 1979 - DNA, 20 bp, Artificial Sequence
  Synthetic
gcggggcggcccgagcaccg

SEQ ID NO: 1980 - DNA, 20 bp, Artificial Sequence
  Synthetic
gctcgggctgcggacggtgg

SEQ ID NO: 1981 - DNA, 20 bp, Artificial Sequence
  Synthetic
gctttccggcagaggcgggg

SEQ ID NO: 1982 - DNA, 20 bp, Artificial Sequence
  Synthetic
gctgtgggaggcctgagggg

SEQ ID NO: 1983 - DNA, 20 bp, Artificial Sequence
  Synthetic
ggcgcgcgagagcctcggcc

SEQ ID NO: 1984 - DNA, 20 bp, Artificial Sequence
  Synthetic
gggcgggcggctctccggag

SEQ ID NO: 1985 - DNA, 20 bp, Artificial Sequence
  Synthetic
ggcctgggtagcacggtcct

SEQ ID NO: 1986 - DNA, 20 bp, Artificial Sequence
  Synthetic
gggccgagggggctgtgcac

SEQ ID NO: 1987 - DNA, 20 bp, Artificial Sequence
  Synthetic
gtcctcagtgccggccgcca

SEQ ID NO: 1988 - DNA, 20 bp, Artificial Sequence
  Synthetic
gcgcgctgccgagtacaagc

SEQ ID NO: 1989 - DNA, 20 bp, Artificial Sequence
  Synthetic
gggaggcgccggcttgtact

SEQ ID NO: 1990 - DNA, 20 bp, Artificial Sequence
  Synthetic
gtagcactatagataccccg

SEQ ID NO: 1991 - DNA, 20 bp, Artificial Sequence
  Synthetic
ggacatgacgatccggtctc

SEQ ID NO: 1992 - DNA, 20 bp, Artificial Sequence
  Synthetic
ggactcacgaagacaaggtc

SEQ ID NO: 1993 - DNA, 20 bp, Artificial Sequence
  Synthetic
gtccggtctctggcccatta

SEQ ID NO: 1994 - DNA, 20 bp, Artificial Sequence
  Synthetic
gagtgggccagagatggcgg

SEQ ID NO: 1995 - DNA, 20 bp, Artificial Sequence
  Synthetic
gcctcggagtgggccagaga

SEQ ID NO: 1996 - DNA, 20 bp, Artificial Sequence
  Synthetic
gggagctaggtcctcggagt

SEQ ID NO: 1997 - DNA, 20 bp, Artificial Sequence
  Synthetic
gcagggcgggagtccagacg

SEQ ID NO: 1998 - DNA, 20 bp, Artificial Sequence
  Synthetic
gccagacaagcaacatggct

SEQ ID NO: 1999 - DNA, 20 bp, Artificial Sequence
  Synthetic
gtgcgcagttcgcgtccccg

SEQ ID NO: 2000 - DNA, 20 bp, Artificial Sequence
  Synthetic
gctgtgtaaagaccacagga

SEQ ID NO: 2001 - DNA, 20 bp, Artificial Sequence
  Synthetic
ggtccctgtgtaaagaccac

SEQ ID NO: 2002 - DNA, 20 bp, Artificial Sequence
  Synthetic
gttagcttgaatggaacact

SEQ ID NO: 2003 - DNA, 20 bp, Artificial Sequence
  Synthetic
ggctgctgcaggacacgaca

SEQ ID NO: 2004 - DNA, 20 bp, Artificial Sequence
  Synthetic
ggtagagtatggggtccgag

SEQ ID NO: 2005 - DNA, 20 bp, Artificial Sequence
  Synthetic
gttcttccagacaccaatcc

SEQ ID NO: 2006 - DNA, 20 bp, Artificial Sequence
  Synthetic
gagtctgcgcagttggtgaa

SEQ ID NO: 2007 - DNA, 20 bp, Artificial Sequence
  Synthetic
ggatgtgtagtgccttccat

SEQ ID NO: 2008 - DNA, 20 bp, Artificial Sequence
  Synthetic
ggcactacacatcgccccga

SEQ ID NO: 2009 - DNA, 20 bp, Artificial Sequence
  Synthetic
ggccgagaggagcaggacgg

SEQ ID NO: 2010 - DNA, 20 bp, Artificial Sequence
  Synthetic
ggcggaacccgcgggaggtg

SEQ ID NO: 2011 - DNA, 20 bp, Artificial Sequence
  Synthetic
gggagtgcggaacccgcggg

SEQ ID NO: 2012 - DNA, 20 bp, Artificial Sequence
  Synthetic
gcggaagtagagtcacggag

SEQ ID NO: 2013 - DNA, 20 bp, Artificial Sequence
  Synthetic
ggaggtaggatccggaagtg

SEQ ID NO: 2014 - DNA, 20 bp, Artificial Sequence
  Synthetic
ggataccggaagtagagtca

SEQ ID NO: 2015 - DNA, 20 bp, Artificial Sequence
  Synthetic
gcaccatgttgccggtcctc

SEQ ID NO: 2016 - DNA, 20 bp, Artificial Sequence
  Synthetic
gcgctttggtcgcttcttcc

SEQ ID NO: 2017 - DNA, 20 bp, Artificial Sequence
  Synthetic
ggaccaaagcgcctgaggac

SEQ ID NO: 2018 - DNA, 20 bp, Artificial Sequence
  Synthetic
gataacggcccgcttacctt

SEQ ID NO: 2019 - DNA, 20 bp, Artificial Sequence
  Synthetic
gcccgcttacctttggcgca

SEQ ID NO: 2020 - DNA, 20 bp, Artificial Sequence
  Synthetic
gtccctgcgccaaaggtaag

SEQ ID NO: 2021 - DNA, 20 bp, Artificial Sequence
  Synthetic
ggcaccggcccgggagggaa

SEQ ID NO: 2022 - DNA, 20 bp, Artificial Sequence
  Synthetic
ggcggcgcaccggcccggga

SEQ ID NO: 2023 - DNA, 20 bp, Artificial Sequence
  Synthetic
gggctgggcccgccccacta

SEQ ID NO: 2024 - DNA, 20 bp, Artificial Sequence
  Synthetic
ggaaggagggcgagttactt

SEQ ID NO: 2025 - DNA, 20 bp, Artificial Sequence
  Synthetic
ggagaacgccgcgaaaagag

SEQ ID NO: 2026 - DNA, 20 bp, Artificial Sequence
  Synthetic
ggagttacttgggctcacgg

SEQ ID NO: 2027 - DNA, 20 bp, Artificial Sequence
  Synthetic
gagggtgtcgcccgaggcca

SEQ ID NO: 2028 - DNA, 20 bp, Artificial Sequence
  Synthetic
ggccgggcccgagcagagtg

SEQ ID NO: 2029 - DNA, 20 bp, Artificial Sequence
  Synthetic
ggcggctgcagagcgatcat

SEQ ID NO: 2030 - DNA, 20 bp, Artificial Sequence
  Synthetic
gagagtgcgggcggaagacg

SEQ ID NO: 2031 - DNA, 20 bp, Artificial Sequence
  Synthetic
gagttgtgttgtgccaatgg

SEQ ID NO: 2032 - DNA, 20 bp, Artificial Sequence
  Synthetic
ggacagttgtgttgtgccaa

SEQ ID NO: 2033 - DNA, 20 bp, Artificial Sequence
  Synthetic
gacctcaggctccaactcgt

SEQ ID NO: 2034 - DNA, 20 bp, Artificial Sequence
  Synthetic
gcaccgcgacaagtgaacgg

SEQ ID NO: 2035 - DNA, 20 bp, Artificial Sequence
  Synthetic
ggcgggagttggagattctg

SEQ ID NO: 2036 - DNA, 84 bp, Artificial Sequence
  Synthetic
tatgaaccactaaggcgtccaccttgttggcccacctcaggcaacaaaggtttaagagctaagctgcgtaaagtctgctggtga

SEQ ID NO: 2037 - DNA, 84 bp, Artificial Sequence
  Synthetic
tatgaaccactaaggcgtccaccttgttggcggcgcgactcctaccctagtttaagagctaagctgcgtaaagtctgctggtga

SEQ ID NO: 2038 - DNA, 84 bp, Artificial Sequence
  Synthetic
tatgaaccactaaggcgtccaccttgttgggccagttagcccttagggtgtttaagagctaagctgcgtaaagtctgctggtga

SEQ ID NO: 2039 - DNA, 84 bp, Artificial Sequence
  Synthetic
tatgaaccactaaggcgtccaccttgttggactgggtccggtgcggcacgtttaagagctaagctgcgtaaagtctgctggtga

SEQ ID NO: 2040 - DNA, 84 bp, Artificial Sequence
  Synthetic
tatgaaccactaaggcgtccaccttgttgggacgcgcgctccaagatgggtttaagagctaagctgcgtaaagtctgctggtga

SEQ ID NO: 2041 - DNA, 84 bp, Artificial Sequence
  Synthetic
tatgaaccactaaggcgtccaccttgttggggcacgggcgtcgcggaacgtttaagagctaagctgcgtaaagtctgctggtga

SEQ ID NO: 2042 - DNA, 84 bp, Artificial Sequence
  Synthetic
tatgaaccactaaggcgtccaccttgttggagtcgtggctgcagcgctggtttaagagctaagctgcgtaaagtctgctggtga

SEQ ID NO: 2043 - DNA, 84 bp, Artificial Sequence
  Synthetic
tatgaaccactaaggcgtccaccttgttgggctgaggcgagaggttggtgtttaagagctaagctgcgtaaagtctgctggtga

SEQ ID NO: 2044 - DNA, 84 bp, Artificial Sequence
  Synthetic
tatgaaccactaaggcgtccaccttgttggtctccggccataatgacccgtttaagagctaagctgcgtaaagtctgctggtga

SEQ ID NO: 2045 - DNA, 84 bp, Artificial Sequence
  Synthetic
tatgaaccactaaggcgtccaccttgttggccactatggacaggtaaaggtttaagagctaagctgcgtaaagtctgctggtga

SEQ ID NO: 2046 - DNA, 84 bp, Artificial Sequence
  Synthetic
tatgaaccactaaggcgtccaccttgttgggacactctggacaccactagtttaagagctaagctgcgtaaagtctgctggtga

SEQ ID NO: 2047 - DNA, 84 bp, Artificial Sequence
  Synthetic
tatgaaccactaaggcgtccaccttgttggttctggcctgagacttgcagtttaagagctaagctgcgtaaagtctgctggtga

SEQ ID NO: 2048 - DNA, 84 bp, Artificial Sequence
  Synthetic
tatgaaccactaaggcgtccaccttgttggaatcccgcagtcaccctgggtttaagagctaagctgcgtaaagtctgctggtga

SEQ ID NO: 2049 - DNA, 84 bp, Artificial Sequence
  Synthetic
tatgaaccactaaggcgtccaccttgttggaggccaccagggtgactgcgtttaagagctaagctgcgtaaagtctgctggtga

SEQ ID NO: 2050 - DNA, 84 bp, Artificial Sequence
  Synthetic
tatgaaccactaaggcgtccaccttgttggtcccaccacgaggccaccagtttaagagctaagctgcgtaaagtctgctggtga

SEQ ID NO: 2051 - DNA, 84 bp, Artificial Sequence
  Synthetic
tatgaaccactaaggcgtccaccttgttggagactgcggagtgggtcaggtttaagagctaagctgcgtaaagtctgctggtga

SEQ ID NO: 2052 - DNA, 84 bp, Artificial Sequence
  Synthetic
tatgaaccactaaggcgtccaccttgttggaggttccgatcacagactggtttaagagctaagctgcgtaaagtctgctggtga

SEQ ID NO: 2053 - DNA, 84 bp, Artificial Sequence
  Synthetic
tatgaaccactaaggcgtccaccttgttgggcaaacccggtaggacttggtttaagagctaagctgcgtaaagtctgctggtga

SEQ ID NO: 2054 - DNA, 84 bp, Artificial Sequence
  Synthetic
tatgaaccactaaggcgtccaccttgttggcggcgggcccatccggaacgtttaagagctaagctgcgtaaagtctgctggtga

SEQ ID NO: 2055 - DNA, 84 bp, Artificial Sequence
  Synthetic
tatgaaccactaaggcgtccaccttgttggcgggcgcggaatcgggcatgtttaagagctaagctgcgtaaagtctgctggtga

SEQ ID NO: 2056 - DNA, 84 bp, Artificial Sequence
  Synthetic
tatgaaccactaaggcgtccaccttgttggggaggcggcaggaaccgacgtttaagagctaagctgcgtaaagtctgctggtga

SEQ ID NO: 2057 - DNA, 84 bp, Artificial Sequence
  Synthetic
tatgaaccactaaggcgtccaccttgttggcgtatctgcaccggcccgagtttaagagctaagctgcgtaaagtctgctggtga

SEQ ID NO: 2058 - DNA, 84 bp, Artificial Sequence
  Synthetic
tatgaaccactaaggcgtccaccttgttgggaggagctaggctgccatcgtttaagagctaagctgcgtaaagtctgctggtga

SEQ ID NO: 2059 - DNA, 84 bp, Artificial Sequence
  Synthetic
tatgaaccactaaggcgtccaccttgttggtctttgtgctcgggttagggtttaagagctaagctgcgtaaagtctgctggtga

SEQ ID NO: 2060 - DNA, 84 bp, Artificial Sequence
  Synthetic
tatgaaccactaaggcgtccaccttgttggagttcgctcgcgcctaggtgtttaagagctaagctgcgtaaagtctgctggtga

SEQ ID NO: 2061 - DNA, 84 bp, Artificial Sequence
  Synthetic
tatgaaccactaaggcgtccaccttgttgggctcgcgcctaggttggcggtttaagagctaagctgcgtaaagtctgctggtga

SEQ ID NO: 2062 - DNA, 84 bp, Artificial Sequence
  Synthetic
tatgaaccactaaggcgtccaccttgttggtcccagcccgcgccaacctgtttaagagctaagctgcgtaaagtctgctggtga

SEQ ID NO: 2063 - DNA, 84 bp, Artificial Sequence
  Synthetic
tatgaaccactaaggcgtccaccttgttggcaccgagggagggcctcaagtttaagagctaagctgcgtaaagtctgctggtga

SEQ ID NO: 2064 - DNA, 84 bp, Artificial Sequence
  Synthetic
tatgaaccactaaggcgtccaccttgttggcgctgctgggagtaagtgtgtttaagagctaagctgcgtaaagtctgctggtga

SEQ ID NO: 2065 - DNA, 84 bp, Artificial Sequence
  Synthetic
tatgaaccactaaggcgtccaccttgttggggccgggctctgagaggacgtttaagagctaagctgcgtaaagtctgctggtga

SEQ ID NO: 2066 - DNA, 84 bp, Artificial Sequence
  Synthetic
tatgaaccactaaggcgtccaccttgttggaaaggtaaaatggatccgggtttaagagctaagctgcgtaaagtctgctggtga

SEQ ID NO: 2067 - DNA, 84 bp, Artificial Sequence
  Synthetic
tatgaaccactaaggcgtccaccttgttggcaacttatgactccagagggtttaagagctaagctgcgtaaagtctgctggtga

SEQ ID NO: 2068 - DNA, 84 bp, Artificial Sequence
  Synthetic
tatgaaccactaaggcgtccaccttgttgggcacaacttatgactccaggtttaagagctaagctgcgtaaagtctgctggtga

SEQ ID NO: 2069 - DNA, 84 bp, Artificial Sequence
  Synthetic
tatgaaccactaaggcgtccaccttgttggctgtgacaatctcaaaggggtttaagagctaagctgcgtaaagtctgctggtga

SEQ ID NO: 2070 - DNA, 84 bp, Artificial Sequence
  Synthetic
tatgaaccactaaggcgtccaccttgttggtccatggcccagaaggaaggtttaagagctaagctgcgtaaagtctgctggtga

SEQ ID NO: 2071 - DNA, 84 bp, Artificial Sequence
  Synthetic
tatgaaccactaaggcgtccaccttgttggtgtggctcaggagtcactggtttaagagctaagctgcgtaaagtctgctggtga

SEQ ID NO: 2072 - DNA, 84 bp, Artificial Sequence
  Synthetic
tatgaaccactaaggcgtccaccttgttggacagaccaggaaccgagaagtttaagagctaagctgcgtaaagtctgctggtga

SEQ ID NO: 2073 - DNA, 84 bp, Artificial Sequence
  Synthetic
tatgaaccactaaggcgtccaccttgttggagcaagtcgcaagagcggggtttaagagctaagctgcgtaaagtctgctggtga

SEQ ID NO: 2074 - DNA, 84 bp, Artificial Sequence
  Synthetic
tatgaaccactaaggcgtccaccttgttggcgctcttgcgacttgctcagtttaagagctaagctgcgtaaagtctgctggtga

SEQ ID NO: 2075 - DNA, 84 bp, Artificial Sequence
  Synthetic
tatgaaccactaaggcgtccaccttgttggagcctgactgggattcgtggtttaagagctaagctgcgtaaagtctgctggtga

SEQ ID NO: 2076 - DNA, 84 bp, Artificial Sequence
  Synthetic
tatgaaccactaaggcgtccaccttgttggcaggacaaagagcctgactgtttaagagctaagctgcgtaaagtctgctggtga

SEQ ID NO: 2077 - DNA, 84 bp, Artificial Sequence
  Synthetic
tatgaaccactaaggcgtccaccttgttggttcaaaaaaagagcgggacgtttaagagctaagctgcgtaaagtctgctggtga

SEQ ID NO: 2078 - DNA, 84 bp, Artificial Sequence
  Synthetic
tatgaaccactaaggcgtccaccttgttggcagagctcccaggaatagtgtttaagagctaagctgcgtaaagtctgctggtga

SEQ ID NO: 2079 - DNA, 84 bp, Artificial Sequence
  Synthetic
tatgaaccactaaggcgtccaccttgttggcagcgcttcagaaaagagtgtttaagagctaagctgcgtaaagtctgctggtga

SEQ ID NO: 2080 - DNA, 84 bp, Artificial Sequence
  Synthetic
tatgaaccactaaggcgtccaccttgttggttcagaaaagagtgggacagtttaagagctaagctgcgtaaagtctgctggtga

SEQ ID NO: 2081 - DNA, 84 bp, Artificial Sequence
  Synthetic
tatgaaccactaaggcgtccaccttgttggcagagcaggaaaaagagccgtttaagagctaagctgcgtaaagtctgctggtga

SEQ ID NO: 2082 - DNA, 84 bp, Artificial Sequence
  Synthetic
tatgaaccactaaggcgtccaccttgttgggccctgccatgactttcgggtttaagagctaagctgcgtaaagtctgctggtga

SEQ ID NO: 2083 - DNA, 84 bp, Artificial Sequence
  Synthetic
tatgaaccactaaggcgtccaccttgttggggagggctgtcctgaaaccgtttaagagctaagctgcgtaaagtctgctggtga

SEQ ID NO: 2084 - DNA, 84 bp, Artificial Sequence
  Synthetic
tatgaaccactaaggcgtccaccttgttggacctgggctgggacagatggtttaagagctaagctgcgtaaagtctgctggtga

SEQ ID NO: 2085 - DNA, 84 bp, Artificial Sequence
  Synthetic
tatgaaccactaaggcgtccaccttgttggaggagcctggctgggagtagtttaagagctaagctgcgtaaagtctgctggtga

SEQ ID NO: 2086 - DNA, 84 bp, Artificial Sequence
  Synthetic
tatgaaccactaaggcgtccaccttgttggtccagagttcaggaatggcgtttaagagctaagctgcgtaaagtctgctggtga

SEQ ID NO: 2087 - DNA, 84 bp, Artificial Sequence
  Synthetic
tatgaaccactaaggcgtccaccttgttggacttgcccctgcttgtctggtttaagagctaagctgcgtaaagtctgctggtga

SEQ ID NO: 2088 - DNA, 84 bp, Artificial Sequence
  Synthetic
tatgaaccactaaggcgtccaccttgttggcagggcaaagagcctgggtgtttaagagctaagctgcgtaaagtctgctggtga

SEQ ID NO: 2089 - DNA, 84 bp, Artificial Sequence
  Synthetic
tatgaaccactaaggcgtccaccttgttggtagtgcctcagacaagcaggtttaagagctaagctgcgtaaagtctgctggtga

SEQ ID NO: 2090 - DNA, 84 bp, Artificial Sequence
  Synthetic
tatgaaccactaaggcgtccaccttgttggcagcaagggctttctaactgtttaagagctaagctgcgtaaagtctgctggtga

SEQ ID NO: 2091 - DNA, 84 bp, Artificial Sequence
  Synthetic
tatgaaccactaaggcgtccaccttgttgggaaagcccttgctgaggtggtttaagagctaagctgcgtaaagtctgctggtga

SEQ ID NO: 2092 - DNA, 84 bp, Artificial Sequence
  Synthetic
tatgaaccactaaggcgtccaccttgttggggtagccacacctcagcaagtttaagagctaagctgcgtaaagtctgctggtga

SEQ ID NO: 2093 - DNA, 84 bp, Artificial Sequence
  Synthetic
tatgaaccactaaggcgtccaccttgttggcagcccaaggtagtaacaggtttaagagctaagctgcgtaaagtctgctggtga

SEQ ID NO: 2094 - DNA, 84 bp, Artificial Sequence
  Synthetic
tatgaaccactaaggcgtccaccttgttggcccagccagcagaagagatgtttaagagctaagctgcgtaaagtctgctggtga

SEQ ID NO: 2095 - DNA, 84 bp, Artificial Sequence
  Synthetic
tatgaaccactaaggcgtccaccttgttgggtccgtctccgacttctgggtttaagagctaagctgcgtaaagtctgctggtga

SEQ ID NO: 2096 - DNA, 84 bp, Artificial Sequence
  Synthetic
tatgaaccactaaggcgtccaccttgttggcactctcaggctcgctgaggtttaagagctaagctgcgtaaagtctgctggtga

SEQ ID NO: 2097 - DNA, 84 bp, Artificial Sequence
  Synthetic
tatgaaccactaaggcgtccaccttgttggcggcgctcgtggaatcttcgtttaagagctaagctgcgtaaagtctgctggtga

SEQ ID NO: 2098 - DNA, 84 bp, Artificial Sequence
  Synthetic
tatgaaccactaaggcgtccaccttgttggctgcgccgaaaggccttgtgtttaagagctaagctgcgtaaagtctgctggtga

SEQ ID NO: 2099 - DNA, 84 bp, Artificial Sequence
  Synthetic
tatgaaccactaaggcgtccaccttgttggccggcccggagcgtttgtggtttaagagctaagctgcgtaaagtctgctggtga

SEQ ID NO: 2100 - DNA, 84 bp, Artificial Sequence
  Synthetic
tatgaaccactaaggcgtccaccttgttggctgttgtacgggttccctagtttaagagctaagctgcgtaaagtctgctggtga

SEQ ID NO: 2101 - DNA, 84 bp, Artificial Sequence
  Synthetic
tatgaaccactaaggcgtccaccttgttgggcgccccggcagtaacttagtttaagagctaagctgcgtaaagtctgctggtga

SEQ ID NO: 2102 - DNA, 84 bp, Artificial Sequence
  Synthetic
tatgaaccactaaggcgtccaccttgttggaaagcggagagtcacagcggtttaagagctaagctgcgtaaagtctgctggtga

SEQ ID NO: 2103 - DNA, 84 bp, Artificial Sequence
  Synthetic
tatgaaccactaaggcgtccaccttgttggcccttgcctgggaatgagggtttaagagctaagctgcgtaaagtctgctggtga

SEQ ID NO: 2104 - DNA, 84 bp, Artificial Sequence
  Synthetic
tatgaaccactaaggcgtccaccttgttggtttctccggcagcagaaaggtttaagagctaagctgcgtaaagtctgctggtga

SEQ ID NO: 2105 - DNA, 84 bp, Artificial Sequence
  Synthetic
tatgaaccactaaggcgtccaccttgttggcaccgggacccatgctggggtttaagagctaagctgcgtaaagtctgctggtga

SEQ ID NO: 2106 - DNA, 84 bp, Artificial Sequence
  Synthetic
tatgaaccactaaggcgtccaccttgttggccgaggcggctctcaaggagtttaagagctaagctgcgtaaagtctgctggtga

SEQ ID NO: 2107 - DNA, 84 bp, Artificial Sequence
  Synthetic
tatgaaccactaaggcgtccaccttgttggcgcgcggccatgatcgccggtttaagagctaagctgcgtaaagtctgctggtga

SEQ ID NO: 2108 - DNA, 84 bp, Artificial Sequence
  Synthetic
tatgaaccactaaggcgtccaccttgttggcagaaccagcacccgtcgggtttaagagctaagctgcgtaaagtctgctggtga

SEQ ID NO: 2109 - DNA, 84 bp, Artificial Sequence
  Synthetic
tatgaaccactaaggcgtccaccttgttggccatgatgcggagctacgggtttaagagctaagctgcgtaaagtctgctggtga

SEQ ID NO: 2110 - DNA, 84 bp, Artificial Sequence
  Synthetic
tatgaaccactaaggcgtccaccttgttgggaggtgagcagctgattgagtttaagagctaagctgcgtaaagtctgctggtga

SEQ ID NO: 2111 - DNA, 84 bp, Artificial Sequence
  Synthetic
tatgaaccactaaggcgtccaccttgttggaaccgggggggcagcgccggtttaagagctaagctgcgtaaagtctgctggtga

SEQ ID NO: 2112 - DNA, 84 bp, Artificial Sequence
  Synthetic
tatgaaccactaaggcgtccaccttgttggccgccgccggccgaggaatgtttaagagctaagctgcgtaaagtctgctggtga

SEQ ID NO: 2113 - DNA, 84 bp, Artificial Sequence
  Synthetic
tatgaaccactaaggcgtccaccttgttggctcagtcatgggccggcgggtttaagagctaagctgcgtaaagtctgctggtga

SEQ ID NO: 2114 - DNA, 84 bp, Artificial Sequence
  Synthetic
tatgaaccactaaggcgtccaccttgttggaagacgcacagacccggcggtttaagagctaagctgcgtaaagtctgctggtga

SEQ ID NO: 2115 - DNA, 84 bp, Artificial Sequence
  Synthetic
tatgaaccactaaggcgtccaccttgttggacgcaaagacgcacagaccgtttaagagctaagctgcgtaaagtctgctggtga

SEQ ID NO: 2116 - DNA, 84 bp, Artificial Sequence
  Synthetic
tatgaaccactaaggcgtccaccttgttggcgcacagacccggcgaggagtttaagagctaagctgcgtaaagtctgctggtga

SEQ ID NO: 2117 - DNA, 84 bp, Artificial Sequence
  Synthetic
tatgaaccactaaggcgtccaccttgttggccggccagacgtcgtgcaggtttaagagctaagctgcgtaaagtctgctggtga

SEQ ID NO: 2118 - DNA, 84 bp, Artificial Sequence
  Synthetic
tatgaaccactaaggcgtccaccttgttggggctgtagtttagtgaaatgtttaagagctaagctgcgtaaagtctgctggtga

SEQ ID NO: 2119 - DNA, 84 bp, Artificial Sequence
  Synthetic
tatgaaccactaaggcgtccaccttgttgggttcaggtgaacaatgtaggtttaagagctaagctgcgtaaagtctgctggtga

SEQ ID NO: 2120 - DNA, 84 bp, Artificial Sequence
  Synthetic
tatgaaccactaaggcgtccaccttgttggaagaagccgtggccgcggggtttaagagctaagctgcgtaaagtctgctggtga

SEQ ID NO: 2121 - DNA, 84 bp, Artificial Sequence
  Synthetic
tatgaaccactaaggcgtccaccttgttggtaggtagctgcgtggctaagtttaagagctaagctgcgtaaagtctgctggtga

SEQ ID NO: 2122 - DNA, 84 bp, Artificial Sequence
  Synthetic
tatgaaccactaaggcgtccaccttgttggttgaaccggaagcgggagtgtttaagagctaagctgcgtaaagtctgctggtga

SEQ ID NO: 2123 - DNA, 84 bp, Artificial Sequence
  Synthetic
tatgaaccactaaggcgtccaccttgttggggagggactgcggcagtgtgtttaagagctaagctgcgtaaagtctgctggtga

SEQ ID NO: 2124 - DNA, 84 bp, Artificial Sequence
  Synthetic
tatgaaccactaaggcgtccaccttgttggggctggagcagggctgacggtttaagagctaagctgcgtaaagtctgctggtga

SEQ ID NO: 2125 - DNA, 84 bp, Artificial Sequence
  Synthetic
tatgaaccactaaggcgtccaccttgttggtgggccaccaggctcggcggtttaagagctaagctgcgtaaagtctgctggtga

SEQ ID NO: 2126 - DNA, 84 bp, Artificial Sequence
  Synthetic
tatgaaccactaaggcgtccaccttgttggagcccaaggcggtgagtatgtttaagagctaagctgcgtaaagtctgctggtga

SEQ ID NO: 2127 - DNA, 84 bp, Artificial Sequence
  Synthetic
tatgaaccactaaggcgtccaccttgttggctcgccggttgagttcagagtttaagagctaagctgcgtaaagtctgctggtga

SEQ ID NO: 2128 - DNA, 84 bp, Artificial Sequence
  Synthetic
tatgaaccactaaggcgtccaccttgttgggctttgctcaaccagggaggtttaagagctaagctgcgtaaagtctgctggtga

SEQ ID NO: 2129 - DNA, 84 bp, Artificial Sequence
  Synthetic
tatgaaccactaaggcgtccaccttgttggagacgccgggaacccgcgtgtttaagagctaagctgcgtaaagtctgctggtga

SEQ ID NO: 2130 - DNA, 84 bp, Artificial Sequence
  Synthetic
tatgaaccactaaggcgtccaccttgttggccgggaacccgcgttggcggtttaagagctaagctgcgtaaagtctgctggtga

SEQ ID NO: 2131 - DNA, 84 bp, Artificial Sequence
  Synthetic
tatgaaccactaaggcgtccaccttgttgggcccgacggagccgtgtgggtttaagagctaagctgcgtaaagtctgctggtga

SEQ ID NO: 2132 - DNA, 84 bp, Artificial Sequence
  Synthetic
tatgaaccactaaggcgtccaccttgttggcactcgcggcggaggcaaggtttaagagctaagctgcgtaaagtctgctggtga

SEQ ID NO: 2133 - DNA, 84 bp, Artificial Sequence
  Synthetic
tatgaaccactaaggcgtccaccttgttggtcggcgctgtcggatacttgtttaagagctaagctgcgtaaagtctgctggtga

SEQ ID NO: 2134 - DNA, 84 bp, Artificial Sequence
  Synthetic
tatgaaccactaaggcgtccaccttgttggtgccgccaggccggagaacgtttaagagctaagctgcgtaaagtctgctggtga

SEQ ID NO: 2135 - DNA, 84 bp, Artificial Sequence
  Synthetic
tatgaaccactaaggcgtccaccttgttgggagcctcggcccaacaaaagtttaagagctaagctgcgtaaagtctgctggtga

SEQ ID NO: 2136 - DNA, 84 bp, Artificial Sequence
  Synthetic
tatgaaccactaaggcgtccaccttgttggggcgcgggggagcgcagatgtttaagagctaagctgcgtaaagtctgctggtga

SEQ ID NO: 2137 - DNA, 84 bp, Artificial Sequence
  Synthetic
tatgaaccactaaggcgtccaccttgttggtgcctgggcccagaccgctgtttaagagctaagctgcgtaaagtctgctggtga

SEQ ID NO: 2138 - DNA, 84 bp, Artificial Sequence
  Synthetic
tatgaaccactaaggcgtccaccttgttggcggcttcctagtgagtcgggtttaagagctaagctgcgtaaagtctgctggtga

SEQ ID NO: 2139 - DNA, 84 bp, Artificial Sequence
  Synthetic
tatgaaccactaaggcgtccaccttgttggcttccggctgtaaagatgggtttaagagctaagctgcgtaaagtctgctggtga

SEQ ID NO: 2140 - DNA, 84 bp, Artificial Sequence
  Synthetic
tatgaaccactaaggcgtccaccttgttgggctacggtgagccgaaggtgtttaagagctaagctgcgtaaagtctgctggtga

SEQ ID NO: 2141 - DNA, 84 bp, Artificial Sequence
  Synthetic
tatgaaccactaaggcgtccaccttgttggacaggtccagtgaaggcgcgtttaagagctaagctgcgtaaagtctgctggtga

SEQ ID NO: 2142 - DNA, 84 bp, Artificial Sequence
  Synthetic
tatgaaccactaaggcgtccaccttgttggcggcggacaggtccagtgagtttaagagctaagctgcgtaaagtctgctggtga

SEQ ID NO: 2143 - DNA, 84 bp, Artificial Sequence
  Synthetic
tatgaaccactaaggcgtccaccttgttgggcgcctcagctctggtgaggtttaagagctaagctgcgtaaagtctgctggtga

SEQ ID NO: 2144 - DNA, 84 bp, Artificial Sequence
  Synthetic
tatgaaccactaaggcgtccaccttgttggcggcccgccgtcccagacggtttaagagctaagctgcgtaaagtctgctggtga

SEQ ID NO: 2145 - DNA, 84 bp, Artificial Sequence
  Synthetic
tatgaaccactaaggcgtccaccttgttggggaagcctcgggaaaccacgtttaagagctaagctgcgtaaagtctgctggtga

SEQ ID NO: 2146 - DNA, 84 bp, Artificial Sequence
  Synthetic
tatgaaccactaaggcgtccaccttgttggtaatcggcagccgaggaacgtttaagagctaagctgcgtaaagtctgctggtga

SEQ ID NO: 2147 - DNA, 84 bp, Artificial Sequence
  Synthetic
tatgaaccactaaggcgtccaccttgttggacttcccaggagctccgaggtttaagagctaagctgcgtaaagtctgctggtga

SEQ ID NO: 2148 - DNA, 84 bp, Artificial Sequence
  Synthetic
tatgaaccactaaggcgtccaccttgttggccaggagctccgagaggcggtttaagagctaagctgcgtaaagtctgctggtga

SEQ ID NO: 2149 - DNA, 84 bp, Artificial Sequence
  Synthetic
tatgaaccactaaggcgtccaccttgttggccgagaggcggggaagtgggtttaagagctaagctgcgtaaagtctgctggtga

SEQ ID NO: 2150 - DNA, 84 bp, Artificial Sequence
  Synthetic
tatgaaccactaaggcgtccaccttgttggcggccgccgggacccgaaggtttaagagctaagctgcgtaaagtctgctggtga

SEQ ID NO: 2151 - DNA, 84 bp, Artificial Sequence
  Synthetic
tatgaaccactaaggcgtccaccttgttgggtcatggagcggaacgccagtttaagagctaagctgcgtaaagtctgctggtga

SEQ ID NO: 2152 - DNA, 84 bp, Artificial Sequence
  Synthetic
tatgaaccactaaggcgtccaccttgttggtcctcctcagcagcaccgggtttaagagctaagctgcgtaaagtctgctggtga

SEQ ID NO: 2153 - DNA, 84 bp, Artificial Sequence
  Synthetic
tatgaaccactaaggcgtccaccttgttggcgcagggaagatgaattgtgtttaagagctaagctgcgtaaagtctgctggtga

SEQ ID NO: 2154 - DNA, 84 bp, Artificial Sequence
  Synthetic
tatgaaccactaaggcgtccaccttgttgggcttgcggcgagacatggtgtttaagagctaagctgcgtaaagtctgctggtga

SEQ ID NO: 2155 - DNA, 84 bp, Artificial Sequence
  Synthetic
tatgaaccactaaggcgtccaccttgttggtgagctgcaagttcaagtggtttaagagctaagctgcgtaaagtctgctggtga

SEQ ID NO: 2156 - DNA, 84 bp, Artificial Sequence
  Synthetic
tatgaaccactaaggcgtccaccttgttggaaagaaaccagccagtccggtttaagagctaagctgcgtaaagtctgctggtga

SEQ ID NO: 2157 - DNA, 84 bp, Artificial Sequence
  Synthetic
tatgaaccactaaggcgtccaccttgttggcctcctcctctgcccgggtgtttaagagctaagctgcgtaaagtctgctggtga

SEQ ID NO: 2158 - DNA, 84 bp, Artificial Sequence
  Synthetic
tatgaaccactaaggcgtccaccttgttggctttctttcagggtctggtgtttaagagctaagctgcgtaaagtctgctggtga

SEQ ID NO: 2159 - DNA, 84 bp, Artificial Sequence
  Synthetic
tatgaaccactaaggcgtccaccttgttggctgtgcgcgagtgagtgaggtttaagagctaagctgcgtaaagtctgctggtga

SEQ ID NO: 2160 - DNA, 84 bp, Artificial Sequence
  Synthetic
tatgaaccactaaggcgtccaccttgttgggagcgcgagcaggacccgggtttaagagctaagctgcgtaaagtctgctggtga

SEQ ID NO: 2161 - DNA, 84 bp, Artificial Sequence
  Synthetic
tatgaaccactaaggcgtccaccttgttggtccccgccggaaccatgtcgtttaagagctaagctgcgtaaagtctgctggtga

SEQ ID NO: 2162 - DNA, 84 bp, Artificial Sequence
  Synthetic
tatgaaccactaaggcgtccaccttgttggaccgaccggcccgacatgggtttaagagctaagctgcgtaaagtctgctggtga

SEQ ID NO: 2163 - DNA, 84 bp, Artificial Sequence
  Synthetic
tatgaaccactaaggcgtccaccttgttggcactgctcccaagacaccggtttaagagctaagctgcgtaaagtctgctggtga

SEQ ID NO: 2164 - DNA, 84 bp, Artificial Sequence
  Synthetic
tatgaaccactaaggcgtccaccttgttggtgggactggcgggtcaggtgtttaagagctaagctgcgtaaagtctgctggtga

SEQ ID NO: 2165 - DNA, 84 bp, Artificial Sequence
  Synthetic
tatgaaccactaaggcgtccaccttgttgggagggcgcggccaactccagtttaagagctaagctgcgtaaagtctgctggtga

SEQ ID NO: 2166 - DNA, 84 bp, Artificial Sequence
  Synthetic
tatgaaccactaaggcgtccaccttgttggggccagggacgggacacaggtttaagagctaagctgcgtaaagtctgctggtga

SEQ ID NO: 2167 - DNA, 84 bp, Artificial Sequence
  Synthetic
tatgaaccactaaggcgtccaccttgttggggcgcggccaactccaggggtttaagagctaagctgcgtaaagtctgctggtga

SEQ ID NO: 2168 - DNA, 84 bp, Artificial Sequence
  Synthetic
tatgaaccactaaggcgtccaccttgttggagacgtgctagcgcgtcgagtttaagagctaagctgcgtaaagtctgctggtga

SEQ ID NO: 2169 - DNA, 84 bp, Artificial Sequence
  Synthetic
tatgaaccactaaggcgtccaccttgttggcgcgtcgaaggtagctctagtttaagagctaagctgcgtaaagtctgctggtga

SEQ ID NO: 2170 - DNA, 84 bp, Artificial Sequence
  Synthetic
tatgaaccactaaggcgtccaccttgttggtcgggaaatggccgctgtggtttaagagctaagctgcgtaaagtctgctggtga

SEQ ID NO: 2171 - DNA, 84 bp, Artificial Sequence
  Synthetic
tatgaaccactaaggcgtccaccttgttggcacgcagactcctagcggagtttaagagctaagctgcgtaaagtctgctggtga

SEQ ID NO: 2172 - DNA, 84 bp, Artificial Sequence
  Synthetic
tatgaaccactaaggcgtccaccttgttggctcgcacgcagactcctaggtttaagagctaagctgcgtaaagtctgctggtga

SEQ ID NO: 2173 - DNA, 84 bp, Artificial Sequence
  Synthetic
tatgaaccactaaggcgtccaccttgttgggcgcgggaagtttggatccgtttaagagctaagctgcgtaaagtctgctggtga

SEQ ID NO: 2174 - DNA, 84 bp, Artificial Sequence
  Synthetic
tatgaaccactaaggcgtccaccttgttggagatcggggcgagacaatggtttaagagctaagctgcgtaaagtctgctggtga

SEQ ID NO: 2175 - DNA, 84 bp, Artificial Sequence
  Synthetic
tatgaaccactaaggcgtccaccttgttgggcagagtggaaactgacacgtttaagagctaagctgcgtaaagtctgctggtga

SEQ ID NO: 2176 - DNA, 84 bp, Artificial Sequence
  Synthetic
tatgaaccactaaggcgtccaccttgttggggcgagacaatggggatgtgtttaagagctaagctgcgtaaagtctgctggtga

SEQ ID NO: 2177 - DNA, 84 bp, Artificial Sequence
  Synthetic
tatgaaccactaaggcgtccaccttgttggcacagcctgtcccccgtccgtttaagagctaagctgcgtaaagtctgctggtga

SEQ ID NO: 2178 - DNA, 84 bp, Artificial Sequence
  Synthetic
tatgaaccactaaggcgtccaccttgttgggaaggcctcctgagcgcaggtttaagagctaagctgcgtaaagtctgctggtga

SEQ ID NO: 2179 - DNA, 84 bp, Artificial Sequence
  Synthetic
tatgaaccactaaggcgtccaccttgttggtcgctgagacttcctggacgtttaagagctaagctgcgtaaagtctgctggtga

SEQ ID NO: 2180 - DNA, 84 bp, Artificial Sequence
  Synthetic
tatgaaccactaaggcgtccaccttgttgggacacccgaggcgcagcaggtttaagagctaagctgcgtaaagtctgctggtga

SEQ ID NO: 2181 - DNA, 84 bp, Artificial Sequence
  Synthetic
tatgaaccactaaggcgtccaccttgttgggaggggacagatttgtgacgtttaagagctaagctgcgtaaagtctgctggtga

SEQ ID NO: 2182 - DNA, 84 bp, Artificial Sequence
  Synthetic
tatgaaccactaaggcgtccaccttgttggggcgcgagcttctgaaactgtttaagagctaagctgcgtaaagtctgctggtga

SEQ ID NO: 2183 - DNA, 84 bp, Artificial Sequence
  Synthetic
tatgaaccactaaggcgtccaccttgttggcccgaggcggacgtgagaagtttaagagctaagctgcgtaaagtctgctggtga

SEQ ID NO: 2184 - DNA, 84 bp, Artificial Sequence
  Synthetic
tatgaaccactaaggcgtccaccttgttgggagaagggtcgggccaagagtttaagagctaagctgcgtaaagtctgctggtga

SEQ ID NO: 2185 - DNA, 84 bp, Artificial Sequence
  Synthetic
tatgaaccactaaggcgtccaccttgttggggaccaagtgggcccgagggtttaagagctaagctgcgtaaagtctgctggtga

SEQ ID NO: 2186 - DNA, 84 bp, Artificial Sequence
  Synthetic
tatgaaccactaaggcgtccaccttgttggcccctcctcaccctcgtaggtttaagagctaagctgcgtaaagtctgctggtga

SEQ ID NO: 2187 - DNA, 84 bp, Artificial Sequence
  Synthetic
tatgaaccactaaggcgtccaccttgttgggatgcccctctcgagaagagtttaagagctaagctgcgtaaagtctgctggtga

SEQ ID NO: 2188 - DNA, 84 bp, Artificial Sequence
  Synthetic
tatgaaccactaaggcgtccaccttgttgggggcccgccgcccgcacccgtttaagagctaagctgcgtaaagtctgctggtga

SEQ ID NO: 2189 - DNA, 84 bp, Artificial Sequence
  Synthetic
tatgaaccactaaggcgtccaccttgttggccaagatggcgacgggaacgtttaagagctaagctgcgtaaagtctgctggtga

SEQ ID NO: 2190 - DNA, 84 bp, Artificial Sequence
  Synthetic
tatgaaccactaaggcgtccaccttgttggctcagggttggagacttcggtttaagagctaagctgcgtaaagtctgctggtga

SEQ ID NO: 2191 - DNA, 84 bp, Artificial Sequence
  Synthetic
tatgaaccactaaggcgtccaccttgttggtcggggccaagatggcgacgtttaagagctaagctgcgtaaagtctgctggtga

SEQ ID NO: 2192 - DNA, 84 bp, Artificial Sequence
  Synthetic
tatgaaccactaaggcgtccaccttgttgggccgccgcctcaccctcgtgtttaagagctaagctgcgtaaagtctgctggtga

SEQ ID NO: 2193 - DNA, 84 bp, Artificial Sequence
  Synthetic
tatgaaccactaaggcgtccaccttgttggtcgtcctacgagggtgagggtttaagagctaagctgcgtaaagtctgctggtga

SEQ ID NO: 2194 - DNA, 84 bp, Artificial Sequence
  Synthetic
tatgaaccactaaggcgtccaccttgttggccagcgagctcggcaacctgtttaagagctaagctgcgtaaagtctgctggtga

SEQ ID NO: 2195 - DNA, 84 bp, Artificial Sequence
  Synthetic
tatgaaccactaaggcgtccaccttgttggacttagtccgatcggtaacgtttaagagctaagctgcgtaaagtctgctggtga

SEQ ID NO: 2196 - DNA, 84 bp, Artificial Sequence
  Synthetic
tatgaaccactaaggcgtccaccttgttggaggtcggtgcgtctgtcgggtttaagagctaagctgcgtaaagtctgctggtga

SEQ ID NO: 2197 - DNA, 84 bp, Artificial Sequence
  Synthetic
tatgaaccactaaggcgtccaccttgttgggactcgcctcctcttcctagtttaagagctaagctgcgtaaagtctgctggtga

SEQ ID NO: 2198 - DNA, 84 bp, Artificial Sequence
  Synthetic
tatgaaccactaaggcgtccaccttgttggcggagggaagtccacggaagtttaagagctaagctgcgtaaagtctgctggtga

SEQ ID NO: 2199 - DNA, 84 bp, Artificial Sequence
  Synthetic
tatgaaccactaaggcgtccaccttgttggggtctggtgggtcgaggaagtttaagagctaagctgcgtaaagtctgctggtga

SEQ ID NO: 2200 - DNA, 84 bp, Artificial Sequence
  Synthetic
tatgaaccactaaggcgtccaccttgttggtgaggggtctggtgggtcggtttaagagctaagctgcgtaaagtctgctggtga

SEQ ID NO: 2201 - DNA, 84 bp, Artificial Sequence
  Synthetic
tatgaaccactaaggcgtccaccttgttggctgcgcggggtattcgaatgtttaagagctaagctgcgtaaagtctgctggtga

SEQ ID NO: 2202 - DNA, 84 bp, Artificial Sequence
  Synthetic
tatgaaccactaaggcgtccaccttgttgggaatgtgtcccacccagcagtttaagagctaagctgcgtaaagtctgctggtga

SEQ ID NO: 2203 - DNA, 84 bp, Artificial Sequence
  Synthetic
tatgaaccactaaggcgtccaccttgttgggcttccccaccccaccagagtttaagagctaagctgcgtaaagtctgctggtga

SEQ ID NO: 2204 - DNA, 84 bp, Artificial Sequence
  Synthetic
tatgaaccactaaggcgtccaccttgttggctgtattcgggccttggacgtttaagagctaagctgcgtaaagtctgctggtga

SEQ ID NO: 2205 - DNA, 84 bp, Artificial Sequence
  Synthetic
tatgaaccactaaggcgtccaccttgttggggttcctgccggctgtattgtttaagagctaagctgcgtaaagtctgctggtga

SEQ ID NO: 2206 - DNA, 84 bp, Artificial Sequence
  Synthetic
tatgaaccactaaggcgtccaccttgttggtctctagactgggacggtggtttaagagctaagctgcgtaaagtctgctggtga

SEQ ID NO: 2207 - DNA, 84 bp, Artificial Sequence
  Synthetic
tatgaaccactaaggcgtccaccttgttggccatttagccacatgggaagtttaagagctaagctgcgtaaagtctgctggtga

SEQ ID NO: 2208 - DNA, 84 bp, Artificial Sequence
  Synthetic
tatgaaccactaaggcgtccaccttgttgggcttgcgctcacttccgccgtttaagagctaagctgcgtaaagtctgctggtga

SEQ ID NO: 2209 - DNA, 84 bp, Artificial Sequence
  Synthetic
tatgaaccactaaggcgtccaccttgttggggcggctcaaccccagccggtttaagagctaagctgcgtaaagtctgctggtga

SEQ ID NO: 2210 - DNA, 84 bp, Artificial Sequence
  Synthetic
tatgaaccactaaggcgtccaccttgttggcgcgaggctgggttacgtggtttaagagctaagctgcgtaaagtctgctggtga

SEQ ID NO: 2211 - DNA, 84 bp, Artificial Sequence
  Synthetic
tatgaaccactaaggcgtccaccttgttgggaatgggttccggcctccggtttaagagctaagctgcgtaaagtctgctggtga

SEQ ID NO: 2212 - DNA, 84 bp, Artificial Sequence
  Synthetic
tatgaaccactaaggcgtccaccttgttgggccctgaggtgcctagaatgtttaagagctaagctgcgtaaagtctgctggtga

SEQ ID NO: 2213 - DNA, 84 bp, Artificial Sequence
  Synthetic
tatgaaccactaaggcgtccaccttgttggccgcgggcgtgtaaacaaagtttaagagctaagctgcgtaaagtctgctggtga

SEQ ID NO: 2214 - DNA, 84 bp, Artificial Sequence
  Synthetic
tatgaaccactaaggcgtccaccttgttggggcggtccgggcgggtgacgtttaagagctaagctgcgtaaagtctgctggtga

SEQ ID NO: 2215 - DNA, 84 bp, Artificial Sequence
  Synthetic
tatgaaccactaaggcgtccaccttgttggggtccgggcgggtgactgggtttaagagctaagctgcgtaaagtctgctggtga

SEQ ID NO: 2216 - DNA, 84 bp, Artificial Sequence
  Synthetic
tatgaaccactaaggcgtccaccttgttggccatggagctgccagctgtgtttaagagctaagctgcgtaaagtctgctggtga

SEQ ID NO: 2217 - DNA, 84 bp, Artificial Sequence
  Synthetic
tatgaaccactaaggcgtccaccttgttgggacaactgagcccgggccggtttaagagctaagctgcgtaaagtctgctggtga

SEQ ID NO: 2218 - DNA, 84 bp, Artificial Sequence
  Synthetic
tatgaaccactaaggcgtccaccttgttggtggtcgcccaagtaagtcggtttaagagctaagctgcgtaaagtctgctggtga

SEQ ID NO: 2219 - DNA, 84 bp, Artificial Sequence
  Synthetic
tatgaaccactaaggcgtccaccttgttggagggagtattatgggctgtgtttaagagctaagctgcgtaaagtctgctggtga

SEQ ID NO: 2220 - DNA, 84 bp, Artificial Sequence
  Synthetic
tatgaaccactaaggcgtccaccttgttggcctgcgcccgcggccggtggtttaagagctaagctgcgtaaagtctgctggtga

SEQ ID NO: 2221 - DNA, 84 bp, Artificial Sequence
  Synthetic
tatgaaccactaaggcgtccaccttgttggcgggcgcagggagtattatgtttaagagctaagctgcgtaaagtctgctggtga

SEQ ID NO: 2222 - DNA, 84 bp, Artificial Sequence
  Synthetic
tatgaaccactaaggcgtccaccttgttggcgcgtgcgcgcccggacgagtttaagagctaagctgcgtaaagtctgctggtga

SEQ ID NO: 2223 - DNA, 84 bp, Artificial Sequence
  Synthetic
tatgaaccactaaggcgtccaccttgttggctgtcagccatcggcgagcgtttaagagctaagctgcgtaaagtctgctggtga

SEQ ID NO: 2224 - DNA, 84 bp, Artificial Sequence
  Synthetic
tatgaaccactaaggcgtccaccttgttgggacgggagggaccccactggtttaagagctaagctgcgtaaagtctgctggtga

SEQ ID NO: 2225 - DNA, 84 bp, Artificial Sequence
  Synthetic
tatgaaccactaaggcgtccaccttgttgggactcgccgcttcccccctgtttaagagctaagctgcgtaaagtctgctggtga

SEQ ID NO: 2226 - DNA, 84 bp, Artificial Sequence
  Synthetic
tatgaaccactaaggcgtccaccttgttgggggaagcggcgagtcaacagtttaagagctaagctgcgtaaagtctgctggtga

SEQ ID NO: 2227 - DNA, 84 bp, Artificial Sequence
  Synthetic
tatgaaccactaaggcgtccaccttgttggtgctcctggaagcggccaagtttaagagctaagctgcgtaaagtctgctggtga

SEQ ID NO: 2228 - DNA, 84 bp, Artificial Sequence
  Synthetic
tatgaaccactaaggcgtccaccttgttggctgctctgtaggaggaggggtttaagagctaagctgcgtaaagtctgctggtga

SEQ ID NO: 2229 - DNA, 84 bp, Artificial Sequence
  Synthetic
tatgaaccactaaggcgtccaccttgttgggccaatcaccgcggagcaagtttaagagctaagctgcgtaaagtctgctggtga

SEQ ID NO: 2230 - DNA, 84 bp, Artificial Sequence
  Synthetic
tatgaaccactaaggcgtccaccttgttggtcgccgagttccaggtgatgtttaagagctaagctgcgtaaagtctgctggtga

SEQ ID NO: 2231 - DNA, 84 bp, Artificial Sequence
  Synthetic
tatgaaccactaaggcgtccaccttgttggaagataacgacgggaagaggtttaagagctaagctgcgtaaagtctgctggtga

SEQ ID NO: 2232 - DNA, 84 bp, Artificial Sequence
  Synthetic
tatgaaccactaaggcgtccaccttgttggcacatagaaagataacgacgtttaagagctaagctgcgtaaagtctgctggtga

SEQ ID NO: 2233 - DNA, 84 bp, Artificial Sequence
  Synthetic
tatgaaccactaaggcgtccaccttgttggtctcagctgggaaggaccggtttaagagctaagctgcgtaaagtctgctggtga

SEQ ID NO: 2234 - DNA, 84 bp, Artificial Sequence
  Synthetic
tatgaaccactaaggcgtccaccttgttgggccgccagcgcggtgtagggtttaagagctaagctgcgtaaagtctgctggtga

SEQ ID NO: 2235 - DNA, 84 bp, Artificial Sequence
  Synthetic
tatgaaccactaaggcgtccaccttgttgggcggccgccagcgcggtgtgtttaagagctaagctgcgtaaagtctgctggtga

SEQ ID NO: 2236 - DNA, 84 bp, Artificial Sequence
  Synthetic
tatgaaccactaaggcgtccaccttgttggtccgccgcggacaagacccgtttaagagctaagctgcgtaaagtctgctggtga

SEQ ID NO: 2237 - DNA, 84 bp, Artificial Sequence
  Synthetic
tatgaaccactaaggcgtccaccttgttggaagatctcgcggaagcctagtttaagagctaagctgcgtaaagtctgctggtga

SEQ ID NO: 2238 - DNA, 84 bp, Artificial Sequence
  Synthetic
tatgaaccactaaggcgtccaccttgttgggcttccgcgagatcttcgggtttaagagctaagctgcgtaaagtctgctggtga

SEQ ID NO: 2239 - DNA, 84 bp, Artificial Sequence
  Synthetic
tatgaaccactaaggcgtccaccttgttggtccgcgagatcttcggtgggtttaagagctaagctgcgtaaagtctgctggtga

SEQ ID NO: 2240 - DNA, 84 bp, Artificial Sequence
  Synthetic
tatgaaccactaaggcgtccaccttgttgggaccctgaacccgaaccatgtttaagagctaagctgcgtaaagtctgctggtga

SEQ ID NO: 2241 - DNA, 84 bp, Artificial Sequence
  Synthetic
tatgaaccactaaggcgtccaccttgttggtaacccggtacctaacaaggtttaagagctaagctgcgtaaagtctgctggtga

SEQ ID NO: 2242 - DNA, 84 bp, Artificial Sequence
  Synthetic
tatgaaccactaaggcgtccaccttgttggttaccttaactgccacctcgtttaagagctaagctgcgtaaagtctgctggtga

SEQ ID NO: 2243 - DNA, 84 bp, Artificial Sequence
  Synthetic
tatgaaccactaaggcgtccaccttgttggaattgagcggagagcgacggtttaagagctaagctgcgtaaagtctgctggtga

SEQ ID NO: 2244 - DNA, 84 bp, Artificial Sequence
  Synthetic
tatgaaccactaaggcgtccaccttgttgggacggccgagggcctcggagtttaagagctaagctgcgtaaagtctgctggtga

SEQ ID NO: 2245 - DNA, 84 bp, Artificial Sequence
  Synthetic
tatgaaccactaaggcgtccaccttgttggtacccggcttattattccggtttaagagctaagctgcgtaaagtctgctggtga

SEQ ID NO: 2246 - DNA, 84 bp, Artificial Sequence
  Synthetic
tatgaaccactaaggcgtccaccttgttggctctctggaaggacggggagtttaagagctaagctgcgtaaagtctgctggtga

SEQ ID NO: 2247 - DNA, 84 bp, Artificial Sequence
  Synthetic
tatgaaccactaaggcgtccaccttgttgggcccgactccagccgaaaagtttaagagctaagctgcgtaaagtctgctggtga

SEQ ID NO: 2248 - DNA, 84 bp, Artificial Sequence
  Synthetic
tatgaaccactaaggcgtccaccttgttggggcggggatactaaagcgagtttaagagctaagctgcgtaaagtctgctggtga

SEQ ID NO: 2249 - DNA, 84 bp, Artificial Sequence
  Synthetic
tatgaaccactaaggcgtccaccttgttgggctcctcggaagccatggtgtttaagagctaagctgcgtaaagtctgctggtga

SEQ ID NO: 2250 - DNA, 84 bp, Artificial Sequence
  Synthetic
tatgaaccactaaggcgtccaccttgttgggggcggcgcggccggatcggtttaagagctaagctgcgtaaagtctgctggtga

SEQ ID NO: 2251 - DNA, 84 bp, Artificial Sequence
  Synthetic
tatgaaccactaaggcgtccaccttgttggtctgcactacaccggagaggtttaagagctaagctgcgtaaagtctgctggtga

SEQ ID NO: 2252 - DNA, 84 bp, Artificial Sequence
  Synthetic
tatgaaccactaaggcgtccaccttgttggacaacaacgggagcaggtcgtttaagagctaagctgcgtaaagtctgctggtga

SEQ ID NO: 2253 - DNA, 84 bp, Artificial Sequence
  Synthetic
tatgaaccactaaggcgtccaccttgttggccaaacaattgatcatcgagtttaagagctaagctgcgtaaagtctgctggtga

SEQ ID NO: 2254 - DNA, 84 bp, Artificial Sequence
  Synthetic
tatgaaccactaaggcgtccaccttgttgggttatcattctcccgagatgtttaagagctaagctgcgtaaagtctgctggtga

SEQ ID NO: 2255 - DNA, 84 bp, Artificial Sequence
  Synthetic
tatgaaccactaaggcgtccaccttgttggacgtcggttgcctaacaacgtttaagagctaagctgcgtaaagtctgctggtga

SEQ ID NO: 2256 - DNA, 84 bp, Artificial Sequence
  Synthetic
tatgaaccactaaggcgtccaccttgttgggccgagtcagtgtacacgtgtttaagagctaagctgcgtaaagtctgctggtga

SEQ ID NO: 2257 - DNA, 84 bp, Artificial Sequence
  Synthetic
tatgaaccactaaggcgtccaccttgttggtgtcgcgccccacgcccaggtttaagagctaagctgcgtaaagtctgctggtga

SEQ ID NO: 2258 - DNA, 84 bp, Artificial Sequence
  Synthetic
tatgaaccactaaggcgtccaccttgttggaaggggtagagaggtgatagtttaagagctaagctgcgtaaagtctgctggtga

SEQ ID NO: 2259 - DNA, 84 bp, Artificial Sequence
  Synthetic
tatgaaccactaaggcgtccaccttgttgggaggaaaggaagggcagtagtttaagagctaagctgcgtaaagtctgctggtga

SEQ ID NO: 2260 - DNA, 84 bp, Artificial Sequence
  Synthetic
tatgaaccactaaggcgtccaccttgttggttcagttctttaacatctagtttaagagctaagctgcgtaaagtctgctggtga

SEQ ID NO: 2261 - DNA, 84 bp, Artificial Sequence
  Synthetic
tatgaaccactaaggcgtccaccttgttgggcgggagggcgaagagcaggtttaagagctaagctgcgtaaagtctgctggtga

SEQ ID NO: 2262 - DNA, 84 bp, Artificial Sequence
  Synthetic
tatgaaccactaaggcgtccaccttgttggggcagctcgacctcctctcgtttaagagctaagctgcgtaaagtctgctggtga

SEQ ID NO: 2263 - DNA, 84 bp, Artificial Sequence
  Synthetic
tatgaaccactaaggcgtccaccttgttggggcgcgggctcccctcagggtttaagagctaagctgcgtaaagtctgctggtga

SEQ ID NO: 2264 - DNA, 84 bp, Artificial Sequence
  Synthetic
tatgaaccactaaggcgtccaccttgttggcagggaagccgtacctggagtttaagagctaagctgcgtaaagtctgctggtga

SEQ ID NO: 2265 - DNA, 84 bp, Artificial Sequence
  Synthetic
tatgaaccactaaggcgtccaccttgttgggagggacccggacagtcaggtttaagagctaagctgcgtaaagtctgctggtga

SEQ ID NO: 2266 - DNA, 84 bp, Artificial Sequence
  Synthetic
tatgaaccactaaggcgtccaccttgttgggtccgggtccctccaggtagtttaagagctaagctgcgtaaagtctgctggtga

SEQ ID NO: 2267 - DNA, 84 bp, Artificial Sequence
  Synthetic
tatgaaccactaaggcgtccaccttgttggactgagggccgagccgagggtttaagagctaagctgcgtaaagtctgctggtga

SEQ ID NO: 2268 - DNA, 84 bp, Artificial Sequence
  Synthetic
tatgaaccactaaggcgtccaccttgttggagcgcctggcttcttactggtttaagagctaagctgcgtaaagtctgctggtga

SEQ ID NO: 2269 - DNA, 84 bp, Artificial Sequence
  Synthetic
tatgaaccactaaggcgtccaccttgttgggaagccgcagtaagaagccgtttaagagctaagctgcgtaaagtctgctggtga

SEQ ID NO: 2270 - DNA, 84 bp, Artificial Sequence
  Synthetic
tatgaaccactaaggcgtccaccttgttggacgacctgggctctcagtagtttaagagctaagctgcgtaaagtctgctggtga

SEQ ID NO: 2271 - DNA, 84 bp, Artificial Sequence
  Synthetic
tatgaaccactaaggcgtccaccttgttgggcagagcgcgctctctctagtttaagagctaagctgcgtaaagtctgctggtga

SEQ ID NO: 2272 - DNA, 84 bp, Artificial Sequence
  Synthetic
tatgaaccactaaggcgtccaccttgttgggttgcgtaaagtgaggcaagtttaagagctaagctgcgtaaagtctgctggtga

SEQ ID NO: 2273 - DNA, 84 bp, Artificial Sequence
  Synthetic
tatgaaccactaaggcgtccaccttgttggcaacatggcctcttcgctggtttaagagctaagctgcgtaaagtctgctggtga

SEQ ID NO: 2274 - DNA, 84 bp, Artificial Sequence
  Synthetic
tatgaaccactaaggcgtccaccttgttgggagggagtaaagcctagaggtttaagagctaagctgcgtaaagtctgctggtga

SEQ ID NO: 2275 - DNA, 84 bp, Artificial Sequence
  Synthetic
tatgaaccactaaggcgtccaccttgttggtaaagcctagagaggagacgtttaagagctaagctgcgtaaagtctgctggtga

SEQ ID NO: 2276 - DNA, 84 bp, Artificial Sequence
  Synthetic
tatgaaccactaaggcgtccaccttgttggaggatggcttcccctctgagtttaagagctaagctgcgtaaagtctgctggtga

SEQ ID NO: 2277 - DNA, 84 bp, Artificial Sequence
  Synthetic
tatgaaccactaaggcgtccaccttgttgggcttcccctctgagggacggtttaagagctaagctgcgtaaagtctgctggtga

SEQ ID NO: 2278 - DNA, 84 bp, Artificial Sequence
  Synthetic
tatgaaccactaaggcgtccaccttgttggtcctcctcgtccctcagaggtttaagagctaagctgcgtaaagtctgctggtga

SEQ ID NO: 2279 - DNA, 84 bp, Artificial Sequence
  Synthetic
tatgaaccactaaggcgtccaccttgttggccggacccagcgcgacctggtttaagagctaagctgcgtaaagtctgctggtga

SEQ ID NO: 2280 - DNA, 84 bp, Artificial Sequence
  Synthetic
tatgaaccactaaggcgtccaccttgttggggtcggctcctctgggcaagtttaagagctaagctgcgtaaagtctgctggtga

SEQ ID NO: 2281 - DNA, 84 bp, Artificial Sequence
  Synthetic
tatgaaccactaaggcgtccaccttgttggtccggagacgcctgaggaagtttaagagctaagctgcgtaaagtctgctggtga

SEQ ID NO: 2282 - DNA, 84 bp, Artificial Sequence
  Synthetic
tatgaaccactaaggcgtccaccttgttggagccggccgagggtggcgggtttaagagctaagctgcgtaaagtctgctggtga

SEQ ID NO: 2283 - DNA, 84 bp, Artificial Sequence
  Synthetic
tatgaaccactaaggcgtccaccttgttggaggcggccgagagaaaggggtttaagagctaagctgcgtaaagtctgctggtga

SEQ ID NO: 2284 - DNA, 84 bp, Artificial Sequence
  Synthetic
tatgaaccactaaggcgtccaccttgttggcgcagccggccgagggtgggtttaagagctaagctgcgtaaagtctgctggtga

SEQ ID NO: 2285 - DNA, 84 bp, Artificial Sequence
  Synthetic
tatgaaccactaaggcgtccaccttgttggcggtccgccgaggccaggggtttaagagctaagctgcgtaaagtctgctggtga

SEQ ID NO: 2286 - DNA, 84 bp, Artificial Sequence
  Synthetic
tatgaaccactaaggcgtccaccttgttggctgctgcaggagccattttgtttaagagctaagctgcgtaaagtctgctggtga

SEQ ID NO: 2287 - DNA, 84 bp, Artificial Sequence
  Synthetic
tatgaaccactaaggcgtccaccttgttggtgaatggagccgggatgaggtttaagagctaagctgcgtaaagtctgctggtga

SEQ ID NO: 2288 - DNA, 84 bp, Artificial Sequence
  Synthetic
tatgaaccactaaggcgtccaccttgttggaagggcggccggtagagtagtttaagagctaagctgcgtaaagtctgctggtga

SEQ ID NO: 2289 - DNA, 84 bp, Artificial Sequence
  Synthetic
tatgaaccactaaggcgtccaccttgttggaggatatagggagcggtatgtttaagagctaagctgcgtaaagtctgctggtga

SEQ ID NO: 2290 - DNA, 84 bp, Artificial Sequence
  Synthetic
tatgaaccactaaggcgtccaccttgttggatggggcagaaaacgcctggtttaagagctaagctgcgtaaagtctgctggtga

SEQ ID NO: 2291 - DNA, 84 bp, Artificial Sequence
  Synthetic
tatgaaccactaaggcgtccaccttgttgggagagtgtgcggctccagggtttaagagctaagctgcgtaaagtctgctggtga

SEQ ID NO: 2292 - DNA, 84 bp, Artificial Sequence
  Synthetic
tatgaaccactaaggcgtccaccttgttggggctccaggtgggctcacggtttaagagctaagctgcgtaaagtctgctggtga

SEQ ID NO: 2293 - DNA, 84 bp, Artificial Sequence
  Synthetic
tatgaaccactaaggcgtccaccttgttggtcacgcggtgagtcatatggtttaagagctaagctgcgtaaagtctgctggtga

SEQ ID NO: 2294 - DNA, 84 bp, Artificial Sequence
  Synthetic
tatgaaccactaaggcgtccaccttgttggccgcaatgtctcttgacaggtttaagagctaagctgcgtaaagtctgctggtga

SEQ ID NO: 2295 - DNA, 84 bp, Artificial Sequence
  Synthetic
tatgaaccactaaggcgtccaccttgttggtggagactcccgaccccaggtttaagagctaagctgcgtaaagtctgctggtga

SEQ ID NO: 2296 - DNA, 84 bp, Artificial Sequence
  Synthetic
tatgaaccactaaggcgtccaccttgttggtgtctcttgacagcggcgggtttaagagctaagctgcgtaaagtctgctggtga

SEQ ID NO: 2297 - DNA, 84 bp, Artificial Sequence
  Synthetic
tatgaaccactaaggcgtccaccttgttggaggttcggagcgggagctcgtttaagagctaagctgcgtaaagtctgctggtga

SEQ ID NO: 2298 - DNA, 84 bp, Artificial Sequence
  Synthetic
tatgaaccactaaggcgtccaccttgttggctcgggctcgcggacggtagtttaagagctaagctgcgtaaagtctgctggtga

SEQ ID NO: 2299 - DNA, 84 bp, Artificial Sequence
  Synthetic
tatgaaccactaaggcgtccaccttgttgggggctcgcggacggtatgggtttaagagctaagctgcgtaaagtctgctggtga

SEQ ID NO: 2300 - DNA, 84 bp, Artificial Sequence
  Synthetic
tatgaaccactaaggcgtccaccttgttggacgtgctcgctcacggcgggtttaagagctaagctgcgtaaagtctgctggtga

SEQ ID NO: 2301 - DNA, 84 bp, Artificial Sequence
  Synthetic
tatgaaccactaaggcgtccaccttgttggcggagaccgagctgggatcgtttaagagctaagctgcgtaaagtctgctggtga

SEQ ID NO: 2302 - DNA, 84 bp, Artificial Sequence
  Synthetic
tatgaaccactaaggcgtccaccttgttggcgtacgtgctcgctcacgggtttaagagctaagctgcgtaaagtctgctggtga

SEQ ID NO: 2303 - DNA, 84 bp, Artificial Sequence
  Synthetic
tatgaaccactaaggcgtccaccttgttggccgggcgggcgcctctcacgtttaagagctaagctgcgtaaagtctgctggtga

SEQ ID NO: 2304 - DNA, 84 bp, Artificial Sequence
  Synthetic
tatgaaccactaaggcgtccaccttgttggcgccgccaaggaagccaacgtttaagagctaagctgcgtaaagtctgctggtga

SEQ ID NO: 2305 - DNA, 84 bp, Artificial Sequence
  Synthetic
tatgaaccactaaggcgtccaccttgttggtcaccgggagcgctcgcgggtttaagagctaagctgcgtaaagtctgctggtga

SEQ ID NO: 2306 - DNA, 84 bp, Artificial Sequence
  Synthetic
tatgaaccactaaggcgtccaccttgttggcctcccctgcgctccactagtttaagagctaagctgcgtaaagtctgctggtga

SEQ ID NO: 2307 - DNA, 84 bp, Artificial Sequence
  Synthetic
tatgaaccactaaggcgtccaccttgttgggccgctgctctccggctgagtttaagagctaagctgcgtaaagtctgctggtga

SEQ ID NO: 2308 - DNA, 84 bp, Artificial Sequence
  Synthetic
tatgaaccactaaggcgtccaccttgttgggggtcagcggggtctacccgtttaagagctaagctgcgtaaagtctgctggtga

SEQ ID NO: 2309 - DNA, 84 bp, Artificial Sequence
  Synthetic
tatgaaccactaaggcgtccaccttgttggcgggtccgcgacaagatgggtttaagagctaagctgcgtaaagtctgctggtga

SEQ ID NO: 2310 - DNA, 84 bp, Artificial Sequence
  Synthetic
tatgaaccactaaggcgtccaccttgttgggcttcgagcgcgatctactgtttaagagctaagctgcgtaaagtctgctggtga

SEQ ID NO: 2311 - DNA, 84 bp, Artificial Sequence
  Synthetic
tatgaaccactaaggcgtccaccttgttggtcgcgctcgaagccccggtgtttaagagctaagctgcgtaaagtctgctggtga

SEQ ID NO: 2312 - DNA, 84 bp, Artificial Sequence
  Synthetic
tatgaaccactaaggcgtccaccttgttgggagtcttgcctgtcagcaggtttaagagctaagctgcgtaaagtctgctggtga

SEQ ID NO: 2313 - DNA, 84 bp, Artificial Sequence
  Synthetic
tatgaaccactaaggcgtccaccttgttggtagtttgccccgtccaaaggtttaagagctaagctgcgtaaagtctgctggtga

SEQ ID NO: 2314 - DNA, 84 bp, Artificial Sequence
  Synthetic
tatgaaccactaaggcgtccaccttgttggttgcagcctcgctacgggggtttaagagctaagctgcgtaaagtctgctggtga

SEQ ID NO: 2315 - DNA, 84 bp, Artificial Sequence
  Synthetic
tatgaaccactaaggcgtccaccttgttggctgccactcggcaccccaagtttaagagctaagctgcgtaaagtctgctggtga

SEQ ID NO: 2316 - DNA, 84 bp, Artificial Sequence
  Synthetic
tatgaaccactaaggcgtccaccttgttgggggcggtgagggtccttgagtttaagagctaagctgcgtaaagtctgctggtga

SEQ ID NO: 2317 - DNA, 84 bp, Artificial Sequence
  Synthetic
tatgaaccactaaggcgtccaccttgttgggttcccgccaagaccctaagtttaagagctaagctgcgtaaagtctgctggtga

SEQ ID NO: 2318 - DNA, 84 bp, Artificial Sequence
  Synthetic
tatgaaccactaaggcgtccaccttgttggacagggccagagaccctaagtttaagagctaagctgcgtaaagtctgctggtga

SEQ ID NO: 2319 - DNA, 84 bp, Artificial Sequence
  Synthetic
tatgaaccactaaggcgtccaccttgttggcccgctggagcccaaatcggtttaagagctaagctgcgtaaagtctgctggtga

SEQ ID NO: 2320 - DNA, 84 bp, Artificial Sequence
  Synthetic
tatgaaccactaaggcgtccaccttgttgggctggagcccaaatcgcgggtttaagagctaagctgcgtaaagtctgctggtga

SEQ ID NO: 2321 - DNA, 84 bp, Artificial Sequence
  Synthetic
tatgaaccactaaggcgtccaccttgttggcgccgccgatcccagagtcgtttaagagctaagctgcgtaaagtctgctggtga

SEQ ID NO: 2322 - DNA, 84 bp, Artificial Sequence
  Synthetic
tatgaaccactaaggcgtccaccttgttggggaagtggcggcgcggtcagtttaagagctaagctgcgtaaagtctgctggtga

SEQ ID NO: 2323 - DNA, 84 bp, Artificial Sequence
  Synthetic
tatgaaccactaaggcgtccaccttgttgggggtcccggactctgggatgtttaagagctaagctgcgtaaagtctgctggtga

SEQ ID NO: 2324 - DNA, 84 bp, Artificial Sequence
  Synthetic
tatgaaccactaaggcgtccaccttgttgggccggggcgcggggcatcagtttaagagctaagctgcgtaaagtctgctggtga

SEQ ID NO: 2325 - DNA, 84 bp, Artificial Sequence
  Synthetic
tatgaaccactaaggcgtccaccttgttggggcctgcaacgtgtctctggtttaagagctaagctgcgtaaagtctgctggtga

SEQ ID NO: 2326 - DNA, 84 bp, Artificial Sequence
  Synthetic
tatgaaccactaaggcgtccaccttgttgggtcgcgctcgagtcccgacgtttaagagctaagctgcgtaaagtctgctggtga

SEQ ID NO: 2327 - DNA, 84 bp, Artificial Sequence
  Synthetic
tatgaaccactaaggcgtccaccttgttgggaaaagtcctcaatacggtgtttaagagctaagctgcgtaaagtctgctggtga

SEQ ID NO: 2328 - DNA, 84 bp, Artificial Sequence
  Synthetic
tatgaaccactaaggcgtccaccttgttgggaacgaaaagtcctcaatagtttaagagctaagctgcgtaaagtctgctggtga

SEQ ID NO: 2329 - DNA, 84 bp, Artificial Sequence
  Synthetic
tatgaaccactaaggcgtccaccttgttggttgggctcaacattgagacgtttaagagctaagctgcgtaaagtctgctggtga

SEQ ID NO: 2330 - DNA, 84 bp, Artificial Sequence
  Synthetic
tatgaaccactaaggcgtccaccttgttggcttcacacggaggacgcgagtttaagagctaagctgcgtaaagtctgctggtga

SEQ ID NO: 2331 - DNA, 84 bp, Artificial Sequence
  Synthetic
tatgaaccactaaggcgtccaccttgttgggaggattgagaggcctctggtttaagagctaagctgcgtaaagtctgctggtga

SEQ ID NO: 2332 - DNA, 84 bp, Artificial Sequence
  Synthetic
tatgaaccactaaggcgtccaccttgttggtctatgcgaagatcatggagtttaagagctaagctgcgtaaagtctgctggtga

SEQ ID NO: 2333 - DNA, 84 bp, Artificial Sequence
  Synthetic
tatgaaccactaaggcgtccaccttgttggaggcgaagccgcggaggacgtttaagagctaagctgcgtaaagtctgctggtga

SEQ ID NO: 2334 - DNA, 84 bp, Artificial Sequence
  Synthetic
tatgaaccactaaggcgtccaccttgttggcgagcaggcgaagccgcgggtttaagagctaagctgcgtaaagtctgctggtga

SEQ ID NO: 2335 - DNA, 84 bp, Artificial Sequence
  Synthetic
tatgaaccactaaggcgtccaccttgttgggagcgagcaggcgaagccggtttaagagctaagctgcgtaaagtctgctggtga

SEQ ID NO: 2336 - DNA, 84 bp, Artificial Sequence
  Synthetic
tatgaaccactaaggcgtccaccttgttggacgccactgagttagaaacgtttaagagctaagctgcgtaaagtctgctggtga

SEQ ID NO: 2337 - DNA, 84 bp, Artificial Sequence
  Synthetic
tatgaaccactaaggcgtccaccttgttggccactgagttagaaactgggtttaagagctaagctgcgtaaagtctgctggtga

SEQ ID NO: 2338 - DNA, 84 bp, Artificial Sequence
  Synthetic
tatgaaccactaaggcgtccaccttgttgggcagcagcgagaatctacagtttaagagctaagctgcgtaaagtctgctggtga

SEQ ID NO: 2339 - DNA, 84 bp, Artificial Sequence
  Synthetic
tatgaaccactaaggcgtccaccttgttggatctgcctagctcccactagtttaagagctaagctgcgtaaagtctgctggtga

SEQ ID NO: 2340 - DNA, 84 bp, Artificial Sequence
  Synthetic
tatgaaccactaaggcgtccaccttgttggccctctcacgggagaactggtttaagagctaagctgcgtaaagtctgctggtga

SEQ ID NO: 2341 - DNA, 84 bp, Artificial Sequence
  Synthetic
tatgaaccactaaggcgtccaccttgttggtcccgtgagagggccttcggtttaagagctaagctgcgtaaagtctgctggtga

SEQ ID NO: 2342 - DNA, 84 bp, Artificial Sequence
  Synthetic
tatgaaccactaaggcgtccaccttgttggaagctgcactactagagacgtttaagagctaagctgcgtaaagtctgctggtga

SEQ ID NO: 2343 - DNA, 84 bp, Artificial Sequence
  Synthetic
tatgaaccactaaggcgtccaccttgttggagaccggtagaaatgaatggtttaagagctaagctgcgtaaagtctgctggtga

SEQ ID NO: 2344 - DNA, 84 bp, Artificial Sequence
  Synthetic
tatgaaccactaaggcgtccaccttgttggtgacggcgaagccttgcgggtttaagagctaagctgcgtaaagtctgctggtga

SEQ ID NO: 2345 - DNA, 84 bp, Artificial Sequence
  Synthetic
tatgaaccactaaggcgtccaccttgttggcgtagctagctgcaagcaggtttaagagctaagctgcgtaaagtctgctggtga

SEQ ID NO: 2346 - DNA, 84 bp, Artificial Sequence
  Synthetic
tatgaaccactaaggcgtccaccttgttgggctagctgcaagcagaggcgtttaagagctaagctgcgtaaagtctgctggtga

SEQ ID NO: 2347 - DNA, 84 bp, Artificial Sequence
  Synthetic
tatgaaccactaaggcgtccaccttgttggtagtgaggcacagcctgcggtttaagagctaagctgcgtaaagtctgctggtga

SEQ ID NO: 2348 - DNA, 84 bp, Artificial Sequence
  Synthetic
tatgaaccactaaggcgtccaccttgttggaccgtgtgggctgtagtaggtttaagagctaagctgcgtaaagtctgctggtga

SEQ ID NO: 2349 - DNA, 84 bp, Artificial Sequence
  Synthetic
tatgaaccactaaggcgtccaccttgttggggttccggccgcaccgtgtgtttaagagctaagctgcgtaaagtctgctggtga

SEQ ID NO: 2350 - DNA, 84 bp, Artificial Sequence
  Synthetic
tatgaaccactaaggcgtccaccttgttggtgtgggctgtagtagcggggtttaagagctaagctgcgtaaagtctgctggtga

SEQ ID NO: 2351 - DNA, 84 bp, Artificial Sequence
  Synthetic
tatgaaccactaaggcgtccaccttgttggagcggttgctggttctgacgtttaagagctaagctgcgtaaagtctgctggtga

SEQ ID NO: 2352 - DNA, 84 bp, Artificial Sequence
  Synthetic
tatgaaccactaaggcgtccaccttgttgggcccggacgccatttccaggtttaagagctaagctgcgtaaagtctgctggtga

SEQ ID NO: 2353 - DNA, 84 bp, Artificial Sequence
  Synthetic
tatgaaccactaaggcgtccaccttgttggggcatcccgggcacctgaagtttaagagctaagctgcgtaaagtctgctggtga

SEQ ID NO: 2354 - DNA, 84 bp, Artificial Sequence
  Synthetic
tatgaaccactaaggcgtccaccttgttggcgctcagagctactccggcgtttaagagctaagctgcgtaaagtctgctggtga

SEQ ID NO: 2355 - DNA, 84 bp, Artificial Sequence
  Synthetic
tatgaaccactaaggcgtccaccttgttgggcgggagccttaatcgggtgtttaagagctaagctgcgtaaagtctgctggtga

SEQ ID NO: 2356 - DNA, 84 bp, Artificial Sequence
  Synthetic
tatgaaccactaaggcgtccaccttgttgggctctgagcgccggctgtggtttaagagctaagctgcgtaaagtctgctggtga

SEQ ID NO: 2357 - DNA, 84 bp, Artificial Sequence
  Synthetic
tatgaaccactaaggcgtccaccttgttggaaacgcacagcaactcgcagtttaagagctaagctgcgtaaagtctgctggtga

SEQ ID NO: 2358 - DNA, 84 bp, Artificial Sequence
  Synthetic
tatgaaccactaaggcgtccaccttgttggagaaggccagagtcacacagtttaagagctaagctgcgtaaagtctgctggtga

SEQ ID NO: 2359 - DNA, 84 bp, Artificial Sequence
  Synthetic
tatgaaccactaaggcgtccaccttgttggggcgaaatggctccgaccggtttaagagctaagctgcgtaaagtctgctggtga

SEQ ID NO: 2360 - DNA, 84 bp, Artificial Sequence
  Synthetic
tatgaaccactaaggcgtccaccttgttggatggagtaacctgacagcggtttaagagctaagctgcgtaaagtctgctggtga

SEQ ID NO: 2361 - DNA, 84 bp, Artificial Sequence
  Synthetic
tatgaaccactaaggcgtccaccttgttggcaactgcggcccaacgccagtttaagagctaagctgcgtaaagtctgctggtga

SEQ ID NO: 2362 - DNA, 84 bp, Artificial Sequence
  Synthetic
tatgaaccactaaggcgtccaccttgttggtaacctgacagcggggacggtttaagagctaagctgcgtaaagtctgctggtga

SEQ ID NO: 2363 - DNA, 84 bp, Artificial Sequence
  Synthetic
tatgaaccactaaggcgtccaccttgttggcagctgccggacccaggtggtttaagagctaagctgcgtaaagtctgctggtga

SEQ ID NO: 2364 - DNA, 84 bp, Artificial Sequence
  Synthetic
tatgaaccactaaggcgtccaccttgttggcgcggctttgcggggacgggtttaagagctaagctgcgtaaagtctgctggtga

SEQ ID NO: 2365 - DNA, 84 bp, Artificial Sequence
  Synthetic
tatgaaccactaaggcgtccaccttgttgggggagccaccggaggtcaagtttaagagctaagctgcgtaaagtctgctggtga

SEQ ID NO: 2366 - DNA, 84 bp, Artificial Sequence
  Synthetic
tatgaaccactaaggcgtccaccttgttggcgtttggcgccaaaccctggtttaagagctaagctgcgtaaagtctgctggtga

SEQ ID NO: 2367 - DNA, 84 bp, Artificial Sequence
  Synthetic
tatgaaccactaaggcgtccaccttgttggctaactcgggcctagaacagtttaagagctaagctgcgtaaagtctgctggtga

SEQ ID NO: 2368 - DNA, 84 bp, Artificial Sequence
  Synthetic
tatgaaccactaaggcgtccaccttgttgggctgacaggattctaactcgtttaagagctaagctgcgtaaagtctgctggtga

SEQ ID NO: 2369 - DNA, 84 bp, Artificial Sequence
  Synthetic
tatgaaccactaaggcgtccaccttgttggcccgggcccggtcagtctggtttaagagctaagctgcgtaaagtctgctggtga

SEQ ID NO: 2370 - DNA, 84 bp, Artificial Sequence
  Synthetic
tatgaaccactaaggcgtccaccttgttggggagctgtgagcggagagggtttaagagctaagctgcgtaaagtctgctggtga

SEQ ID NO: 2371 - DNA, 84 bp, Artificial Sequence
  Synthetic
tatgaaccactaaggcgtccaccttgttgggggcccggtcagtctgagggtttaagagctaagctgcgtaaagtctgctggtga

SEQ ID NO: 2372 - DNA, 84 bp, Artificial Sequence
  Synthetic
tatgaaccactaaggcgtccaccttgttgggtacgcgccggcatctcgggtttaagagctaagctgcgtaaagtctgctggtga

SEQ ID NO: 2373 - DNA, 84 bp, Artificial Sequence
  Synthetic
tatgaaccactaaggcgtccaccttgttggtcggaggcttcagcagacggtttaagagctaagctgcgtaaagtctgctggtga

SEQ ID NO: 2374 - DNA, 84 bp, Artificial Sequence
  Synthetic
tatgaaccactaaggcgtccaccttgttggtggccgggacggccagtgtgtttaagagctaagctgcgtaaagtctgctggtga

SEQ ID NO: 2375 - DNA, 84 bp, Artificial Sequence
  Synthetic
tatgaaccactaaggcgtccaccttgttggcactcctcgagggctccaggtttaagagctaagctgcgtaaagtctgctggtga

SEQ ID NO: 2376 - DNA, 84 bp, Artificial Sequence
  Synthetic
tatgaaccactaaggcgtccaccttgttggccaaggccccactcctcgagtttaagagctaagctgcgtaaagtctgctggtga

SEQ ID NO: 2377 - DNA, 84 bp, Artificial Sequence
  Synthetic
tatgaaccactaaggcgtccaccttgttggccccgctggagggcctggtgtttaagagctaagctgcgtaaagtctgctggtga

SEQ ID NO: 2378 - DNA, 84 bp, Artificial Sequence
  Synthetic
tatgaaccactaaggcgtccaccttgttggcagccctcgaagcagctgggtttaagagctaagctgcgtaaagtctgctggtga

SEQ ID NO: 2379 - DNA, 84 bp, Artificial Sequence
  Synthetic
tatgaaccactaaggcgtccaccttgttggccactcccgctgccccgtcgtttaagagctaagctgcgtaaagtctgctggtga

SEQ ID NO: 2380 - DNA, 84 bp, Artificial Sequence
  Synthetic
tatgaaccactaaggcgtccaccttgttgggccggtcccgtccgtcggggtttaagagctaagctgcgtaaagtctgctggtga

SEQ ID NO: 2381 - DNA, 84 bp, Artificial Sequence
  Synthetic
tatgaaccactaaggcgtccaccttgttgggcaccccggagatcagagggtttaagagctaagctgcgtaaagtctgctggtga

SEQ ID NO: 2382 - DNA, 84 bp, Artificial Sequence
  Synthetic
tatgaaccactaaggcgtccaccttgttggggatagcctccaggattgggtttaagagctaagctgcgtaaagtctgctggtga

SEQ ID NO: 2383 - DNA, 84 bp, Artificial Sequence
  Synthetic
tatgaaccactaaggcgtccaccttgttggtccgcaccccggagatcaggtttaagagctaagctgcgtaaagtctgctggtga

SEQ ID NO: 2384 - DNA, 84 bp, Artificial Sequence
  Synthetic
tatgaaccactaaggcgtccaccttgttggacgctcgtggtggatccatgtttaagagctaagctgcgtaaagtctgctggtga

SEQ ID NO: 2385 - DNA, 84 bp, Artificial Sequence
  Synthetic
tatgaaccactaaggcgtccaccttgttggcaccagatgggccagccaggtttaagagctaagctgcgtaaagtctgctggtga

SEQ ID NO: 2386 - DNA, 84 bp, Artificial Sequence
  Synthetic
tatgaaccactaaggcgtccaccttgttggttcttccgagggctcaagtgtttaagagctaagctgcgtaaagtctgctggtga

SEQ ID NO: 2387 - DNA, 84 bp, Artificial Sequence
  Synthetic
tatgaaccactaaggcgtccaccttgttggcatgttgcgactcctggtggtttaagagctaagctgcgtaaagtctgctggtga

SEQ ID NO: 2388 - DNA, 84 bp, Artificial Sequence
  Synthetic
tatgaaccactaaggcgtccaccttgttggctgcgcgctgcggactgtggtttaagagctaagctgcgtaaagtctgctggtga

SEQ ID NO: 2389 - DNA, 84 bp, Artificial Sequence
  Synthetic
tatgaaccactaaggcgtccaccttgttgggcttctcggcccgaggcaggtttaagagctaagctgcgtaaagtctgctggtga

SEQ ID NO: 2390 - DNA, 84 bp, Artificial Sequence
  Synthetic
tatgaaccactaaggcgtccaccttgttggcaggatggcagtagtttaggtttaagagctaagctgcgtaaagtctgctggtga

SEQ ID NO: 2391 - DNA, 84 bp, Artificial Sequence
  Synthetic
tatgaaccactaaggcgtccaccttgttggcagtacctgacaataatcagtttaagagctaagctgcgtaaagtctgctggtga

SEQ ID NO: 2392 - DNA, 84 bp, Artificial Sequence
  Synthetic
tatgaaccactaaggcgtccaccttgttggggtcacaggaaactcgcccgtttaagagctaagctgcgtaaagtctgctggtga

SEQ ID NO: 2393 - DNA, 84 bp, Artificial Sequence
  Synthetic
tatgaaccactaaggcgtccaccttgttggaaagccaggctactaccgcgtttaagagctaagctgcgtaaagtctgctggtga

SEQ ID NO: 2394 - DNA, 84 bp, Artificial Sequence
  Synthetic
tatgaaccactaaggcgtccaccttgttggaccgcaggtaccaagacaggtttaagagctaagctgcgtaaagtctgctggtga

SEQ ID NO: 2395 - DNA, 84 bp, Artificial Sequence
  Synthetic
tatgaaccactaaggcgtccaccttgttggctccggaacaggaaaccgagtttaagagctaagctgcgtaaagtctgctggtga

SEQ ID NO: 2396 - DNA, 84 bp, Artificial Sequence
  Synthetic
tatgaaccactaaggcgtccaccttgttggaacagggcttgacagcgcggtttaagagctaagctgcgtaaagtctgctggtga

SEQ ID NO: 2397 - DNA, 84 bp, Artificial Sequence
  Synthetic
tatgaaccactaaggcgtccaccttgttgggacaaaccgcggggtgaccgtttaagagctaagctgcgtaaagtctgctggtga

SEQ ID NO: 2398 - DNA, 84 bp, Artificial Sequence
  Synthetic
tatgaaccactaaggcgtccaccttgttggttacagtggcgggagttgggtttaagagctaagctgcgtaaagtctgctggtga

SEQ ID NO: 2399 - DNA, 84 bp, Artificial Sequence
  Synthetic
tatgaaccactaaggcgtccaccttgttggaggagaccaccgggggaaggtttaagagctaagctgcgtaaagtctgctggtga

SEQ ID NO: 2400 - DNA, 84 bp, Artificial Sequence
  Synthetic
tatgaaccactaaggcgtccaccttgttggaggcgagcgaggagaccacgtttaagagctaagctgcgtaaagtctgctggtga

SEQ ID NO: 2401 - DNA, 84 bp, Artificial Sequence
  Synthetic
tatgaaccactaaggcgtccaccttgttggcgagcgaggagaccaccgggtttaagagctaagctgcgtaaagtctgctggtga

SEQ ID NO: 2402 - DNA, 84 bp, Artificial Sequence
  Synthetic
tatgaaccactaaggcgtccaccttgttggcggcccgggtgacaggcgggtttaagagctaagctgcgtaaagtctgctggtga

SEQ ID NO: 2403 - DNA, 84 bp, Artificial Sequence
  Synthetic
tatgaaccactaaggcgtccaccttgttgggccgctgcctgcaaagtccgtttaagagctaagctgcgtaaagtctgctggtga

SEQ ID NO: 2404 - DNA, 84 bp, Artificial Sequence
  Synthetic
tatgaaccactaaggcgtccaccttgttggtggcggcaggcctcggcgagtttaagagctaagctgcgtaaagtctgctggtga

SEQ ID NO: 2405 - DNA, 84 bp, Artificial Sequence
  Synthetic
tatgaaccactaaggcgtccaccttgttggctgaaacgtctttggaagggtttaagagctaagctgcgtaaagtctgctggtga

SEQ ID NO: 2406 - DNA, 84 bp, Artificial Sequence
  Synthetic
tatgaaccactaaggcgtccaccttgttgggcagcgggtcggagatcgagtttaagagctaagctgcgtaaagtctgctggtga

SEQ ID NO: 2407 - DNA, 84 bp, Artificial Sequence
  Synthetic
tatgaaccactaaggcgtccaccttgttgggtctttggaaggaggaagggtttaagagctaagctgcgtaaagtctgctggtga

SEQ ID NO: 2408 - DNA, 84 bp, Artificial Sequence
  Synthetic
tatgaaccactaaggcgtccaccttgttggatctctggtggctctgctagtttaagagctaagctgcgtaaagtctgctggtga

SEQ ID NO: 2409 - DNA, 84 bp, Artificial Sequence
  Synthetic
tatgaaccactaaggcgtccaccttgttggctacggcggcgcagaaatggtttaagagctaagctgcgtaaagtctgctggtga

SEQ ID NO: 2410 - DNA, 84 bp, Artificial Sequence
  Synthetic
tatgaaccactaaggcgtccaccttgttggtctggtggctctgctacgggtttaagagctaagctgcgtaaagtctgctggtga

SEQ ID NO: 2411 - DNA, 84 bp, Artificial Sequence
  Synthetic
tatgaaccactaaggcgtccaccttgttggccaccaagattctgcagaggtttaagagctaagctgcgtaaagtctgctggtga

SEQ ID NO: 2412 - DNA, 84 bp, Artificial Sequence
  Synthetic
tatgaaccactaaggcgtccaccttgttgggagtggcgggagaagttgcgtttaagagctaagctgcgtaaagtctgctggtga

SEQ ID NO: 2413 - DNA, 84 bp, Artificial Sequence
  Synthetic
tatgaaccactaaggcgtccaccttgttggtgcgtggcagttgaaagaggtttaagagctaagctgcgtaaagtctgctggtga

SEQ ID NO: 2414 - DNA, 84 bp, Artificial Sequence
  Synthetic
tatgaaccactaaggcgtccaccttgttggagcgaggaagaggtcggtcgtttaagagctaagctgcgtaaagtctgctggtga

SEQ ID NO: 2415 - DNA, 84 bp, Artificial Sequence
  Synthetic
tatgaaccactaaggcgtccaccttgttggccggaagcgaggaagaggtgtttaagagctaagctgcgtaaagtctgctggtga

SEQ ID NO: 2416 - DNA, 84 bp, Artificial Sequence
  Synthetic
tatgaaccactaaggcgtccaccttgttgggcgcgggttggacccgggagtttaagagctaagctgcgtaaagtctgctggtga

SEQ ID NO: 2417 - DNA, 84 bp, Artificial Sequence
  Synthetic
tatgaaccactaaggcgtccaccttgttggctagggactgtggcctcgggtttaagagctaagctgcgtaaagtctgctggtga

SEQ ID NO: 2418 - DNA, 84 bp, Artificial Sequence
  Synthetic
tatgaaccactaaggcgtccaccttgttgggagaaccgcgcccaccccggtttaagagctaagctgcgtaaagtctgctggtga

SEQ ID NO: 2419 - DNA, 84 bp, Artificial Sequence
  Synthetic
tatgaaccactaaggcgtccaccttgttgggcggaagcggagggatctcgtttaagagctaagctgcgtaaagtctgctggtga

SEQ ID NO: 2420 - DNA, 84 bp, Artificial Sequence
  Synthetic
tatgaaccactaaggcgtccaccttgttggagagagagcgggcgagagtgtttaagagctaagctgcgtaaagtctgctggtga

SEQ ID NO: 2421 - DNA, 84 bp, Artificial Sequence
  Synthetic
tatgaaccactaaggcgtccaccttgttggctaccgctagcctgtaagggtttaagagctaagctgcgtaaagtctgctggtga

SEQ ID NO: 2422 - DNA, 84 bp, Artificial Sequence
  Synthetic
tatgaaccactaaggcgtccaccttgttggctagcctgtaaggaggattgtttaagagctaagctgcgtaaagtctgctggtga

SEQ ID NO: 2423 - DNA, 84 bp, Artificial Sequence
  Synthetic
tatgaaccactaaggcgtccaccttgttggacggcagcgtccagggtccgtttaagagctaagctgcgtaaagtctgctggtga

SEQ ID NO: 2424 - DNA, 84 bp, Artificial Sequence
  Synthetic
tatgaaccactaaggcgtccaccttgttggcgctccggccgcgtcaggagtttaagagctaagctgcgtaaagtctgctggtga

SEQ ID NO: 2425 - DNA, 84 bp, Artificial Sequence
  Synthetic
tatgaaccactaaggcgtccaccttgttggtgaggcccagggtaagtgagtttaagagctaagctgcgtaaagtctgctggtga

SEQ ID NO: 2426 - DNA, 84 bp, Artificial Sequence
  Synthetic
tatgaaccactaaggcgtccaccttgttggcgcgatgcagtgtggggaagtttaagagctaagctgcgtaaagtctgctggtga

SEQ ID NO: 2427 - DNA, 84 bp, Artificial Sequence
  Synthetic
tatgaaccactaaggcgtccaccttgttggcgctgcgcgatgcagtgtggtttaagagctaagctgcgtaaagtctgctggtga

SEQ ID NO: 2428 - DNA, 84 bp, Artificial Sequence
  Synthetic
tatgaaccactaaggcgtccaccttgttggtaacaccagccgggagggtgtttaagagctaagctgcgtaaagtctgctggtga

SEQ ID NO: 2429 - DNA, 84 bp, Artificial Sequence
  Synthetic
tatgaaccactaaggcgtccaccttgttggaaagactgcagagggatcggtttaagagctaagctgcgtaaagtctgctggtga

SEQ ID NO: 2430 - DNA, 84 bp, Artificial Sequence
  Synthetic
tatgaaccactaaggcgtccaccttgttgggactgcagagggatcgagggtttaagagctaagctgcgtaaagtctgctggtga

SEQ ID NO: 2431 - DNA, 84 bp, Artificial Sequence
  Synthetic
tatgaaccactaaggcgtccaccttgttgggtccagatgctagcctcgggtttaagagctaagctgcgtaaagtctgctggtga

SEQ ID NO: 2432 - DNA, 84 bp, Artificial Sequence
  Synthetic
tatgaaccactaaggcgtccaccttgttggcggcgccatgaagtgagaagtttaagagctaagctgcgtaaagtctgctggtga

SEQ ID NO: 2433 - DNA, 84 bp, Artificial Sequence
  Synthetic
tatgaaccactaaggcgtccaccttgttgggggagcagcagtgatagcggtttaagagctaagctgcgtaaagtctgctggtga

SEQ ID NO: 2434 - DNA, 84 bp, Artificial Sequence
  Synthetic
tatgaaccactaaggcgtccaccttgttggggtcgtcgagcccagagaagtttaagagctaagctgcgtaaagtctgctggtga

SEQ ID NO: 2435 - DNA, 84 bp, Artificial Sequence
  Synthetic
tatgaaccactaaggcgtccaccttgttggcccaaaggcctgtcccaacgtttaagagctaagctgcgtaaagtctgctggtga

SEQ ID NO: 2436 - DNA, 84 bp, Artificial Sequence
  Synthetic
tatgaaccactaaggcgtccaccttgttggcgctcccacaggcccgccggtttaagagctaagctgcgtaaagtctgctggtga

SEQ ID NO: 2437 - DNA, 84 bp, Artificial Sequence
  Synthetic
tatgaaccactaaggcgtccaccttgttgggtggacaacagggagcttcgtttaagagctaagctgcgtaaagtctgctggtga

SEQ ID NO: 2438 - DNA, 84 bp, Artificial Sequence
  Synthetic
tatgaaccactaaggcgtccaccttgttgggtcagggcagccggctcgagtttaagagctaagctgcgtaaagtctgctggtga

SEQ ID NO: 2439 - DNA, 84 bp, Artificial Sequence
  Synthetic
tatgaaccactaaggcgtccaccttgttgggtcgctcgtactccagcaggtttaagagctaagctgcgtaaagtctgctggtga

SEQ ID NO: 2440 - DNA, 84 bp, Artificial Sequence
  Synthetic
tatgaaccactaaggcgtccaccttgttggtactccagcagcggcgccagtttaagagctaagctgcgtaaagtctgctggtga

SEQ ID NO: 2441 - DNA, 84 bp, Artificial Sequence
  Synthetic
tatgaaccactaaggcgtccaccttgttgggacagatcacagtagtggggtttaagagctaagctgcgtaaagtctgctggtga

SEQ ID NO: 2442 - DNA, 84 bp, Artificial Sequence
  Synthetic
tatgaaccactaaggcgtccaccttgttgggggaggcggtgtggttggtgtttaagagctaagctgcgtaaagtctgctggtga

SEQ ID NO: 2443 - DNA, 84 bp, Artificial Sequence
  Synthetic
tatgaaccactaaggcgtccaccttgttggtagtgggaggcggtgtggtgtttaagagctaagctgcgtaaagtctgctggtga

SEQ ID NO: 2444 - DNA, 84 bp, Artificial Sequence
  Synthetic
tatgaaccactaaggcgtccaccttgttggagtgggggacggcactaatgtttaagagctaagctgcgtaaagtctgctggtga

SEQ ID NO: 2445 - DNA, 84 bp, Artificial Sequence
  Synthetic
tatgaaccactaaggcgtccaccttgttggggacgcagccgcctcatgggtttaagagctaagctgcgtaaagtctgctggtga

SEQ ID NO: 2446 - DNA, 84 bp, Artificial Sequence
  Synthetic
tatgaaccactaaggcgtccaccttgttgggtcccccactggaaaaccggtttaagagctaagctgcgtaaagtctgctggtga

SEQ ID NO: 2447 - DNA, 84 bp, Artificial Sequence
  Synthetic
tatgaaccactaaggcgtccaccttgttggcccgtcgagctgggttccagtttaagagctaagctgcgtaaagtctgctggtga

SEQ ID NO: 2448 - DNA, 84 bp, Artificial Sequence
  Synthetic
tatgaaccactaaggcgtccaccttgttgggtcgagctgggttccaagggtttaagagctaagctgcgtaaagtctgctggtga

SEQ ID NO: 2449 - DNA, 84 bp, Artificial Sequence
  Synthetic
tatgaaccactaaggcgtccaccttgttggtgggttccaaggcggctgggtttaagagctaagctgcgtaaagtctgctggtga

SEQ ID NO: 2450 - DNA, 84 bp, Artificial Sequence
  Synthetic
tatgaaccactaaggcgtccaccttgttgggagcttggagcttagagttgtttaagagctaagctgcgtaaagtctgctggtga

SEQ ID NO: 2451 - DNA, 84 bp, Artificial Sequence
  Synthetic
tatgaaccactaaggcgtccaccttgttgggaggcatcccgaaggtttcgtttaagagctaagctgcgtaaagtctgctggtga

SEQ ID NO: 2452 - DNA, 84 bp, Artificial Sequence
  Synthetic
tatgaaccactaaggcgtccaccttgttgggttagctagacccgcccaggtttaagagctaagctgcgtaaagtctgctggtga

SEQ ID NO: 2453 - DNA, 84 bp, Artificial Sequence
  Synthetic
tatgaaccactaaggcgtccaccttgttggccgcccctgagctctgtcagtttaagagctaagctgcgtaaagtctgctggtga

SEQ ID NO: 2454 - DNA, 84 bp, Artificial Sequence
  Synthetic
tatgaaccactaaggcgtccaccttgttgggcatatcgtgtcctcacacgtttaagagctaagctgcgtaaagtctgctggtga

SEQ ID NO: 2455 - DNA, 84 bp, Artificial Sequence
  Synthetic
tatgaaccactaaggcgtccaccttgttgggtgaggacacgatatgctggtttaagagctaagctgcgtaaagtctgctggtga

SEQ ID NO: 2456 - DNA, 84 bp, Artificial Sequence
  Synthetic
tatgaaccactaaggcgtccaccttgttggagggtcagactagcgccaggtttaagagctaagctgcgtaaagtctgctggtga

SEQ ID NO: 2457 - DNA, 84 bp, Artificial Sequence
  Synthetic
tatgaaccactaaggcgtccaccttgttggcctccgccaggcaaaaggagtttaagagctaagctgcgtaaagtctgctggtga

SEQ ID NO: 2458 - DNA, 84 bp, Artificial Sequence
  Synthetic
tatgaaccactaaggcgtccaccttgttggggtacgcgagcgtccctgagtttaagagctaagctgcgtaaagtctgctggtga

SEQ ID NO: 2459 - DNA, 84 bp, Artificial Sequence
  Synthetic
tatgaaccactaaggcgtccaccttgttgggactgccccgggccgctgagtttaagagctaagctgcgtaaagtctgctggtga

SEQ ID NO: 2460 - DNA, 84 bp, Artificial Sequence
  Synthetic
tatgaaccactaaggcgtccaccttgttgggtcctgtacctaggaaagagtttaagagctaagctgcgtaaagtctgctggtga

SEQ ID NO: 2461 - DNA, 84 bp, Artificial Sequence
  Synthetic
tatgaaccactaaggcgtccaccttgttggtcctggagggagtgtcggggtttaagagctaagctgcgtaaagtctgctggtga

SEQ ID NO: 2462 - DNA, 84 bp, Artificial Sequence
  Synthetic
tatgaaccactaaggcgtccaccttgttggcgtccacgggtgagtatgggtttaagagctaagctgcgtaaagtctgctggtga

SEQ ID NO: 2463 - DNA, 84 bp, Artificial Sequence
  Synthetic
tatgaaccactaaggcgtccaccttgttgggttccaccatactcacccggtttaagagctaagctgcgtaaagtctgctggtga

SEQ ID NO: 2464 - DNA, 84 bp, Artificial Sequence
  Synthetic
tatgaaccactaaggcgtccaccttgttggtggcgtccacgggtgagtagtttaagagctaagctgcgtaaagtctgctggtga

SEQ ID NO: 2465 - DNA, 84 bp, Artificial Sequence
  Synthetic
tatgaaccactaaggcgtccaccttgttggggaacccgcgcaaattgaagtttaagagctaagctgcgtaaagtctgctggtga

SEQ ID NO: 2466 - DNA, 84 bp, Artificial Sequence
  Synthetic
tatgaaccactaaggcgtccaccttgttggggccggcaacgcagaacacgtttaagagctaagctgcgtaaagtctgctggtga

SEQ ID NO: 2467 - DNA, 84 bp, Artificial Sequence
  Synthetic
tatgaaccactaaggcgtccaccttgttggtggccagagcacccacggcgtttaagagctaagctgcgtaaagtctgctggtga

SEQ ID NO: 2468 - DNA, 84 bp, Artificial Sequence
  Synthetic
tatgaaccactaaggcgtccaccttgttggacccgcggctcgggatggagtttaagagctaagctgcgtaaagtctgctggtga

SEQ ID NO: 2469 - DNA, 84 bp, Artificial Sequence
  Synthetic
tatgaaccactaaggcgtccaccttgttggcgggacccgcggctcgggagtttaagagctaagctgcgtaaagtctgctggtga

SEQ ID NO: 2470 - DNA, 84 bp, Artificial Sequence
  Synthetic
tatgaaccactaaggcgtccaccttgttgggtcctagcagcgggacccggtttaagagctaagctgcgtaaagtctgctggtga

SEQ ID NO: 2471 - DNA, 84 bp, Artificial Sequence
  Synthetic
tatgaaccactaaggcgtccaccttgttggccggaccgagcgccaaacggtttaagagctaagctgcgtaaagtctgctggtga

SEQ ID NO: 2472 - DNA, 84 bp, Artificial Sequence
  Synthetic
tatgaaccactaaggcgtccaccttgttgggccccgctcggcgatacccgtttaagagctaagctgcgtaaagtctgctggtga

SEQ ID NO: 2473 - DNA, 84 bp, Artificial Sequence
  Synthetic
tatgaaccactaaggcgtccaccttgttgggtcgcgtccgacacccggtgtttaagagctaagctgcgtaaagtctgctggtga

SEQ ID NO: 2474 - DNA, 84 bp, Artificial Sequence
  Synthetic
tatgaaccactaaggcgtccaccttgttggatggagggggagagtacgtgtttaagagctaagctgcgtaaagtctgctggtga

SEQ ID NO: 2475 - DNA, 84 bp, Artificial Sequence
  Synthetic
tatgaaccactaaggcgtccaccttgttggcctcttgtgtagcctgagggtttaagagctaagctgcgtaaagtctgctggtga

SEQ ID NO: 2476 - DNA, 84 bp, Artificial Sequence
  Synthetic
tatgaaccactaaggcgtccaccttgttgggaggcggcggtagcatggagtttaagagctaagctgcgtaaagtctgctggtga

SEQ ID NO: 2477 - DNA, 84 bp, Artificial Sequence
  Synthetic
tatgaaccactaaggcgtccaccttgttggacagggcaccgagggaagggtttaagagctaagctgcgtaaagtctgctggtga

SEQ ID NO: 2478 - DNA, 84 bp, Artificial Sequence
  Synthetic
tatgaaccactaaggcgtccaccttgttggcgagggaaggaggacgcgagtttaagagctaagctgcgtaaagtctgctggtga

SEQ ID NO: 2479 - DNA, 84 bp, Artificial Sequence
  Synthetic
tatgaaccactaaggcgtccaccttgttgggtgacagggcaccgagggagtttaagagctaagctgcgtaaagtctgctggtga

SEQ ID NO: 2480 - DNA, 84 bp, Artificial Sequence
  Synthetic
tatgaaccactaaggcgtccaccttgttggaaggccatgtccgactcgtgtttaagagctaagctgcgtaaagtctgctggtga

SEQ ID NO: 2481 - DNA, 84 bp, Artificial Sequence
  Synthetic
tatgaaccactaaggcgtccaccttgttgggagttcgggacccacgagtgtttaagagctaagctgcgtaaagtctgctggtga

SEQ ID NO: 2482 - DNA, 84 bp, Artificial Sequence
  Synthetic
tatgaaccactaaggcgtccaccttgttgggggacccacgagtcggacagtttaagagctaagctgcgtaaagtctgctggtga

SEQ ID NO: 2483 - DNA, 84 bp, Artificial Sequence
  Synthetic
tatgaaccactaaggcgtccaccttgttggcaacgcagcggcaacatacgtttaagagctaagctgcgtaaagtctgctggtga

SEQ ID NO: 2484 - DNA, 84 bp, Artificial Sequence
  Synthetic
tatgaaccactaaggcgtccaccttgttggcggaggccccacgtcgatagtttaagagctaagctgcgtaaagtctgctggtga

SEQ ID NO: 2485 - DNA, 84 bp, Artificial Sequence
  Synthetic
tatgaaccactaaggcgtccaccttgttgggcgtcgaacgcagaggagggtttaagagctaagctgcgtaaagtctgctggtga

SEQ ID NO: 2486 - DNA, 84 bp, Artificial Sequence
  Synthetic
tatgaaccactaaggcgtccaccttgttgggagggcgaccggctcaaaggtttaagagctaagctgcgtaaagtctgctggtga

SEQ ID NO: 2487 - DNA, 84 bp, Artificial Sequence
  Synthetic
tatgaaccactaaggcgtccaccttgttggggtctggccgacacgtcaggtttaagagctaagctgcgtaaagtctgctggtga

SEQ ID NO: 2488 - DNA, 84 bp, Artificial Sequence
  Synthetic
tatgaaccactaaggcgtccaccttgttggtcccgcggtcgcccggcaggtttaagagctaagctgcgtaaagtctgctggtga

SEQ ID NO: 2489 - DNA, 84 bp, Artificial Sequence
  Synthetic
tatgaaccactaaggcgtccaccttgttggcgggaaagtcgaaaactacgtttaagagctaagctgcgtaaagtctgctggtga

SEQ ID NO: 2490 - DNA, 84 bp, Artificial Sequence
  Synthetic
tatgaaccactaaggcgtccaccttgttggcggtgagtaagtggagcaagtttaagagctaagctgcgtaaagtctgctggtga

SEQ ID NO: 2491 - DNA, 84 bp, Artificial Sequence
  Synthetic
tatgaaccactaaggcgtccaccttgttgggaaagtcgaaaactacggggtttaagagctaagctgcgtaaagtctgctggtga

SEQ ID NO: 2492 - DNA, 84 bp, Artificial Sequence
  Synthetic
tatgaaccactaaggcgtccaccttgttgggaacggctgcggcttcggggtttaagagctaagctgcgtaaagtctgctggtga

SEQ ID NO: 2493 - DNA, 84 bp, Artificial Sequence
  Synthetic
tatgaaccactaaggcgtccaccttgttgggacagcgcgggaacggctggtttaagagctaagctgcgtaaagtctgctggtga

SEQ ID NO: 2494 - DNA, 84 bp, Artificial Sequence
  Synthetic
tatgaaccactaaggcgtccaccttgttggttgggagaccggagaaaccgtttaagagctaagctgcgtaaagtctgctggtga

SEQ ID NO: 2495 - DNA, 84 bp, Artificial Sequence
  Synthetic
tatgaaccactaaggcgtccaccttgttggctgcagaagggattccatggtttaagagctaagctgcgtaaagtctgctggtga

SEQ ID NO: 2496 - DNA, 84 bp, Artificial Sequence
  Synthetic
tatgaaccactaaggcgtccaccttgttgggcggctgcacaaccagtgggtttaagagctaagctgcgtaaagtctgctggtga

SEQ ID NO: 2497 - DNA, 84 bp, Artificial Sequence
  Synthetic
tatgaaccactaaggcgtccaccttgttgggggtcccaggtgctgacgtgtttaagagctaagctgcgtaaagtctgctggtga

SEQ ID NO: 2498 - DNA, 84 bp, Artificial Sequence
  Synthetic
tatgaaccactaaggcgtccaccttgttggcgcagacccggccaaccaggtttaagagctaagctgcgtaaagtctgctggtga

SEQ ID NO: 2499 - DNA, 84 bp, Artificial Sequence
  Synthetic
tatgaaccactaaggcgtccaccttgttgggcccgctcggctctcgcgggtttaagagctaagctgcgtaaagtctgctggtga

SEQ ID NO: 2500 - DNA, 84 bp, Artificial Sequence
  Synthetic
tatgaaccactaaggcgtccaccttgttggtctcaacctcgcctctggtgtttaagagctaagctgcgtaaagtctgctggtga

SEQ ID NO: 2501 - DNA, 84 bp, Artificial Sequence
  Synthetic
tatgaaccactaaggcgtccaccttgttggagccgctctgcagtcacctgtttaagagctaagctgcgtaaagtctgctggtga

SEQ ID NO: 2502 - DNA, 84 bp, Artificial Sequence
  Synthetic
tatgaaccactaaggcgtccaccttgttgggaaccgcgaaagctgaggcgtttaagagctaagctgcgtaaagtctgctggtga

SEQ ID NO: 2503 - DNA, 84 bp, Artificial Sequence
  Synthetic
tatgaaccactaaggcgtccaccttgttgggtggcggcgttgggttgaggtttaagagctaagctgcgtaaagtctgctggtga

SEQ ID NO: 2504 - DNA, 84 bp, Artificial Sequence
  Synthetic
tatgaaccactaaggcgtccaccttgttggaccgccatggctcgaagtcgtttaagagctaagctgcgtaaagtctgctggtga

SEQ ID NO: 2505 - DNA, 84 bp, Artificial Sequence
  Synthetic
tatgaaccactaaggcgtccaccttgttggcttcgagccatggcggtgagtttaagagctaagctgcgtaaagtctgctggtga

SEQ ID NO: 2506 - DNA, 84 bp, Artificial Sequence
  Synthetic
tatgaaccactaaggcgtccaccttgttggtccggacttcgagccatgggtttaagagctaagctgcgtaaagtctgctggtga

SEQ ID NO: 2507 - DNA, 84 bp, Artificial Sequence
  Synthetic
tatgaaccactaaggcgtccaccttgttggatggggatcggaaccgtaggtttaagagctaagctgcgtaaagtctgctggtga

SEQ ID NO: 2508 - DNA, 84 bp, Artificial Sequence
  Synthetic
tatgaaccactaaggcgtccaccttgttgggaaggaaaccgatggggatgtttaagagctaagctgcgtaaagtctgctggtga

SEQ ID NO: 2509 - DNA, 84 bp, Artificial Sequence
  Synthetic
tatgaaccactaaggcgtccaccttgttggtggttgtcggcctaatgaggtttaagagctaagctgcgtaaagtctgctggtga

SEQ ID NO: 2510 - DNA, 84 bp, Artificial Sequence
  Synthetic
tatgaaccactaaggcgtccaccttgttggagctcgcggaggaagtcgggtttaagagctaagctgcgtaaagtctgctggtga

SEQ ID NO: 2511 - DNA, 84 bp, Artificial Sequence
  Synthetic
tatgaaccactaaggcgtccaccttgttggcggcagcgagctcctcctcgtttaagagctaagctgcgtaaagtctgctggtga

SEQ ID NO: 2512 - DNA, 84 bp, Artificial Sequence
  Synthetic
tatgaaccactaaggcgtccaccttgttggctcgctgccgggggacgctgtttaagagctaagctgcgtaaagtctgctggtga

SEQ ID NO: 2513 - DNA, 84 bp, Artificial Sequence
  Synthetic
tatgaaccactaaggcgtccaccttgttggagagccccgcacagagcgagtttaagagctaagctgcgtaaagtctgctggtga

SEQ ID NO: 2514 - DNA, 84 bp, Artificial Sequence
  Synthetic
tatgaaccactaaggcgtccaccttgttggcgcctcactccagagagaggtttaagagctaagctgcgtaaagtctgctggtga

SEQ ID NO: 2515 - DNA, 84 bp, Artificial Sequence
  Synthetic
tatgaaccactaaggcgtccaccttgttgggtgagagcgaaggtctcgggtttaagagctaagctgcgtaaagtctgctggtga

SEQ ID NO: 2516 - DNA, 84 bp, Artificial Sequence
  Synthetic
tatgaaccactaaggcgtccaccttgttggcggcagctgcggaaggctcgtttaagagctaagctgcgtaaagtctgctggtga

SEQ ID NO: 2517 - DNA, 84 bp, Artificial Sequence
  Synthetic
tatgaaccactaaggcgtccaccttgttgggccgcggcgccgagaaagtgtttaagagctaagctgcgtaaagtctgctggtga

SEQ ID NO: 2518 - DNA, 84 bp, Artificial Sequence
  Synthetic
tatgaaccactaaggcgtccaccttgttgggtccagggccacttctcccgtttaagagctaagctgcgtaaagtctgctggtga

SEQ ID NO: 2519 - DNA, 84 bp, Artificial Sequence
  Synthetic
tatgaaccactaaggcgtccaccttgttggatctacctggcttgaggaagtttaagagctaagctgcgtaaagtctgctggtga

SEQ ID NO: 2520 - DNA, 84 bp, Artificial Sequence
  Synthetic
tatgaaccactaaggcgtccaccttgttgggcaaaagacgacgaactgggtttaagagctaagctgcgtaaagtctgctggtga

SEQ ID NO: 2521 - DNA, 84 bp, Artificial Sequence
  Synthetic
tatgaaccactaaggcgtccaccttgttgggcagcaaaagacgacgaacgtttaagagctaagctgcgtaaagtctgctggtga

SEQ ID NO: 2522 - DNA, 84 bp, Artificial Sequence
  Synthetic
tatgaaccactaaggcgtccaccttgttggcgggagcgcgggctttggagtttaagagctaagctgcgtaaagtctgctggtga

SEQ ID NO: 2523 - DNA, 84 bp, Artificial Sequence
  Synthetic
tatgaaccactaaggcgtccaccttgttgggagaagggagagcgagcttgtttaagagctaagctgcgtaaagtctgctggtga

SEQ ID NO: 2524 - DNA, 84 bp, Artificial Sequence
  Synthetic
tatgaaccactaaggcgtccaccttgttgggagcgcgggctttggaagggtttaagagctaagctgcgtaaagtctgctggtga

SEQ ID NO: 2525 - DNA, 84 bp, Artificial Sequence
  Synthetic
tatgaaccactaaggcgtccaccttgttggaggaagagtggctctatgggtttaagagctaagctgcgtaaagtctgctggtga

SEQ ID NO: 2526 - DNA, 84 bp, Artificial Sequence
  Synthetic
tatgaaccactaaggcgtccaccttgttggcgagactccaatcccaggagtttaagagctaagctgcgtaaagtctgctggtga

SEQ ID NO: 2527 - DNA, 84 bp, Artificial Sequence
  Synthetic
tatgaaccactaaggcgtccaccttgttgggtcctgtccggcctgacttgtttaagagctaagctgcgtaaagtctgctggtga

SEQ ID NO: 2528 - DNA, 84 bp, Artificial Sequence
  Synthetic
tatgaaccactaaggcgtccaccttgttggaagcaaagactagctccccgtttaagagctaagctgcgtaaagtctgctggtga

SEQ ID NO: 2529 - DNA, 84 bp, Artificial Sequence
  Synthetic
tatgaaccactaaggcgtccaccttgttggatcagtgggaggacccggggtttaagagctaagctgcgtaaagtctgctggtga

SEQ ID NO: 2530 - DNA, 84 bp, Artificial Sequence
  Synthetic
tatgaaccactaaggcgtccaccttgttgggggctcaaccgccaggcccgtttaagagctaagctgcgtaaagtctgctggtga

SEQ ID NO: 2531 - DNA, 84 bp, Artificial Sequence
  Synthetic
tatgaaccactaaggcgtccaccttgttggaagaggatttggagggtacgtttaagagctaagctgcgtaaagtctgctggtga

SEQ ID NO: 2532 - DNA, 84 bp, Artificial Sequence
  Synthetic
tatgaaccactaaggcgtccaccttgttgggcccccgaaagccatgcgcgtttaagagctaagctgcgtaaagtctgctggtga

SEQ ID NO: 2533 - DNA, 84 bp, Artificial Sequence
  Synthetic
tatgaaccactaaggcgtccaccttgttgggcggaaggccaggaagaaagtttaagagctaagctgcgtaaagtctgctggtga

SEQ ID NO: 2534 - DNA, 84 bp, Artificial Sequence
  Synthetic
tatgaaccactaaggcgtccaccttgttggaccgaagaatgcaggcggggtttaagagctaagctgcgtaaagtctgctggtga

SEQ ID NO: 2535 - DNA, 84 bp, Artificial Sequence
  Synthetic
tatgaaccactaaggcgtccaccttgttggcccctagtaacagaggcgggtttaagagctaagctgcgtaaagtctgctggtga

SEQ ID NO: 2536 - DNA, 84 bp, Artificial Sequence
  Synthetic
tatgaaccactaaggcgtccaccttgttggcgagaccccctagtaacaggtttaagagctaagctgcgtaaagtctgctggtga

SEQ ID NO: 2537 - DNA, 84 bp, Artificial Sequence
  Synthetic
tatgaaccactaaggcgtccaccttgttggagaggtggggcaggccgtcgtttaagagctaagctgcgtaaagtctgctggtga

SEQ ID NO: 2538 - DNA, 84 bp, Artificial Sequence
  Synthetic
tatgaaccactaaggcgtccaccttgttggggccgtctggctagctagggtttaagagctaagctgcgtaaagtctgctggtga

SEQ ID NO: 2539 - DNA, 84 bp, Artificial Sequence
  Synthetic
tatgaaccactaaggcgtccaccttgttggtctgtgaggcgcagaggtggtttaagagctaagctgcgtaaagtctgctggtga

SEQ ID NO: 2540 - DNA, 84 bp, Artificial Sequence
  Synthetic
tatgaaccactaaggcgtccaccttgttggagacggtgaggaccctgcagtttaagagctaagctgcgtaaagtctgctggtga

SEQ ID NO: 2541 - DNA, 84 bp, Artificial Sequence
  Synthetic
tatgaaccactaaggcgtccaccttgttgggaccgagacagccgagcccgtttaagagctaagctgcgtaaagtctgctggtga

SEQ ID NO: 2542 - DNA, 84 bp, Artificial Sequence
  Synthetic
tatgaaccactaaggcgtccaccttgttgggtcgaagtcccgccctgcagtttaagagctaagctgcgtaaagtctgctggtga

SEQ ID NO: 2543 - DNA, 84 bp, Artificial Sequence
  Synthetic
tatgaaccactaaggcgtccaccttgttggagactcggggtgcgcgagggtttaagagctaagctgcgtaaagtctgctggtga

SEQ ID NO: 2544 - DNA, 84 bp, Artificial Sequence
  Synthetic
tatgaaccactaaggcgtccaccttgttgggaggatcgacagagtggtggtttaagagctaagctgcgtaaagtctgctggtga

SEQ ID NO: 2545 - DNA, 84 bp, Artificial Sequence
  Synthetic
tatgaaccactaaggcgtccaccttgttgggcgaggaggatcgacagaggtttaagagctaagctgcgtaaagtctgctggtga

SEQ ID NO: 2546 - DNA, 84 bp, Artificial Sequence
  Synthetic
tatgaaccactaaggcgtccaccttgttggatctgtgggccgaggtgtggtttaagagctaagctgcgtaaagtctgctggtga

SEQ ID NO: 2547 - DNA, 84 bp, Artificial Sequence
  Synthetic
tatgaaccactaaggcgtccaccttgttggggacgctcgccacacacctgtttaagagctaagctgcgtaaagtctgctggtga

SEQ ID NO: 2548 - DNA, 84 bp, Artificial Sequence
  Synthetic
tatgaaccactaaggcgtccaccttgttggtgtgtggcgagcgtccgaggtttaagagctaagctgcgtaaagtctgctggtga

SEQ ID NO: 2549 - DNA, 84 bp, Artificial Sequence
  Synthetic
tatgaaccactaaggcgtccaccttgttggccgccgagtcaccatgagggtttaagagctaagctgcgtaaagtctgctggtga

SEQ ID NO: 2550 - DNA, 84 bp, Artificial Sequence
  Synthetic
tatgaaccactaaggcgtccaccttgttgggggagaaaaccgccgcggagtttaagagctaagctgcgtaaagtctgctggtga

SEQ ID NO: 2551 - DNA, 84 bp, Artificial Sequence
  Synthetic
tatgaaccactaaggcgtccaccttgttggtgaggggagaaaaccgccggtttaagagctaagctgcgtaaagtctgctggtga

SEQ ID NO: 2552 - DNA, 84 bp, Artificial Sequence
  Synthetic
tatgaaccactaaggcgtccaccttgttggacatgctagcgaggtagacgtttaagagctaagctgcgtaaagtctgctggtga

SEQ ID NO: 2553 - DNA, 84 bp, Artificial Sequence
  Synthetic
tatgaaccactaaggcgtccaccttgttggcgggccgcggcaagactgggtttaagagctaagctgcgtaaagtctgctggtga

SEQ ID NO: 2554 - DNA, 84 bp, Artificial Sequence
  Synthetic
tatgaaccactaaggcgtccaccttgttgggtagaccggtgaagcacgagtttaagagctaagctgcgtaaagtctgctggtga

SEQ ID NO: 2555 - DNA, 84 bp, Artificial Sequence
  Synthetic
tatgaaccactaaggcgtccaccttgttggaatccgagttcccggatgagtttaagagctaagctgcgtaaagtctgctggtga

SEQ ID NO: 2556 - DNA, 84 bp, Artificial Sequence
  Synthetic
tatgaaccactaaggcgtccaccttgttgggcgggtggcagccattggtgtttaagagctaagctgcgtaaagtctgctggtga

SEQ ID NO: 2557 - DNA, 84 bp, Artificial Sequence
  Synthetic
tatgaaccactaaggcgtccaccttgttggggtggtgggatctcaccgtgtttaagagctaagctgcgtaaagtctgctggtga

SEQ ID NO: 2558 - DNA, 84 bp, Artificial Sequence
  Synthetic
tatgaaccactaaggcgtccaccttgttgggcgcggaccgccgccaacagtttaagagctaagctgcgtaaagtctgctggtga

SEQ ID NO: 2559 - DNA, 84 bp, Artificial Sequence
  Synthetic
tatgaaccactaaggcgtccaccttgttggggtgatcgtagctcggaaagtttaagagctaagctgcgtaaagtctgctggtga

SEQ ID NO: 2560 - DNA, 84 bp, Artificial Sequence
  Synthetic
tatgaaccactaaggcgtccaccttgttggtccgagctacgatcacccggtttaagagctaagctgcgtaaagtctgctggtga

SEQ ID NO: 2561 - DNA, 84 bp, Artificial Sequence
  Synthetic
tatgaaccactaaggcgtccaccttgttggaccgactgacggtagggacgtttaagagctaagctgcgtaaagtctgctggtga

SEQ ID NO: 2562 - DNA, 84 bp, Artificial Sequence
  Synthetic
tatgaaccactaaggcgtccaccttgttggggacggaccgactgacggtgtttaagagctaagctgcgtaaagtctgctggtga

SEQ ID NO: 2563 - DNA, 84 bp, Artificial Sequence
  Synthetic
tatgaaccactaaggcgtccaccttgttggggacgggaggcgagcaagagtttaagagctaagctgcgtaaagtctgctggtga

SEQ ID NO: 2564 - DNA, 84 bp, Artificial Sequence
  Synthetic
tatgaaccactaaggcgtccaccttgttgggctcggtaccacccggcaggtttaagagctaagctgcgtaaagtctgctggtga

SEQ ID NO: 2565 - DNA, 84 bp, Artificial Sequence
  Synthetic
tatgaaccactaaggcgtccaccttgttggggcctccacgggggaggaagtttaagagctaagctgcgtaaagtctgctggtga

SEQ ID NO: 2566 - DNA, 84 bp, Artificial Sequence
  Synthetic
tatgaaccactaaggcgtccaccttgttggtggccccctcctcgcgagtgtttaagagctaagctgcgtaaagtctgctggtga

SEQ ID NO: 2567 - DNA, 84 bp, Artificial Sequence
  Synthetic
tatgaaccactaaggcgtccaccttgttgggaccccaagttagctctcagtttaagagctaagctgcgtaaagtctgctggtga

SEQ ID NO: 2568 - DNA, 84 bp, Artificial Sequence
  Synthetic
tatgaaccactaaggcgtccaccttgttgggagccctgagagctaacttgtttaagagctaagctgcgtaaagtctgctggtga

SEQ ID NO: 2569 - DNA, 84 bp, Artificial Sequence
  Synthetic
tatgaaccactaaggcgtccaccttgttgggctcgtgcccggagatgaggtttaagagctaagctgcgtaaagtctgctggtga

SEQ ID NO: 2570 - DNA, 84 bp, Artificial Sequence
  Synthetic
tatgaaccactaaggcgtccaccttgttggcagacatggcggacggcaggtttaagagctaagctgcgtaaagtctgctggtga

SEQ ID NO: 2571 - DNA, 84 bp, Artificial Sequence
  Synthetic
tatgaaccactaaggcgtccaccttgttggcgcgccggtcgcccagacagtttaagagctaagctgcgtaaagtctgctggtga

SEQ ID NO: 2572 - DNA, 84 bp, Artificial Sequence
  Synthetic
tatgaaccactaaggcgtccaccttgttggtccctccggaagaccccgggtttaagagctaagctgcgtaaagtctgctggtga

SEQ ID NO: 2573 - DNA, 84 bp, Artificial Sequence
  Synthetic
tatgaaccactaaggcgtccaccttgttggaggagcggcgcaggggatggtttaagagctaagctgcgtaaagtctgctggtga

SEQ ID NO: 2574 - DNA, 84 bp, Artificial Sequence
  Synthetic
tatgaaccactaaggcgtccaccttgttggcgggcaacgccggaagtcagtttaagagctaagctgcgtaaagtctgctggtga

SEQ ID NO: 2575 - DNA, 84 bp, Artificial Sequence
  Synthetic
tatgaaccactaaggcgtccaccttgttgggcccgggagccgcctgagggtttaagagctaagctgcgtaaagtctgctggtga

SEQ ID NO: 2576 - DNA, 84 bp, Artificial Sequence
  Synthetic
tatgaaccactaaggcgtccaccttgttggcgacgtctgactggactcggtttaagagctaagctgcgtaaagtctgctggtga

SEQ ID NO: 2577 - DNA, 84 bp, Artificial Sequence
  Synthetic
tatgaaccactaaggcgtccaccttgttgggacggcgtcgacgtctgacgtttaagagctaagctgcgtaaagtctgctggtga

SEQ ID NO: 2578 - DNA, 84 bp, Artificial Sequence
  Synthetic
tatgaaccactaaggcgtccaccttgttggtcaggagcgcacgactgaagtttaagagctaagctgcgtaaagtctgctggtga

SEQ ID NO: 2579 - DNA, 84 bp, Artificial Sequence
  Synthetic
tatgaaccactaaggcgtccaccttgttggcagccagcgcggctcctatgtttaagagctaagctgcgtaaagtctgctggtga

SEQ ID NO: 2580 - DNA, 84 bp, Artificial Sequence
  Synthetic
tatgaaccactaaggcgtccaccttgttggccgtgcgcagttccccccagtttaagagctaagctgcgtaaagtctgctggtga

SEQ ID NO: 2581 - DNA, 84 bp, Artificial Sequence
  Synthetic
tatgaaccactaaggcgtccaccttgttggtagccaataggagccgcgcgtttaagagctaagctgcgtaaagtctgctggtga

SEQ ID NO: 2582 - DNA, 84 bp, Artificial Sequence
  Synthetic
tatgaaccactaaggcgtccaccttgttggaccacgctcgcgcggaccagtttaagagctaagctgcgtaaagtctgctggtga

SEQ ID NO: 2583 - DNA, 84 bp, Artificial Sequence
  Synthetic
tatgaaccactaaggcgtccaccttgttggcacctccgcgggtcaccccgtttaagagctaagctgcgtaaagtctgctggtga

SEQ ID NO: 2584 - DNA, 84 bp, Artificial Sequence
  Synthetic
tatgaaccactaaggcgtccaccttgttggtgacccgcggaggtgggaggtttaagagctaagctgcgtaaagtctgctggtga

SEQ ID NO: 2585 - DNA, 84 bp, Artificial Sequence
  Synthetic
tatgaaccactaaggcgtccaccttgttggagagagggcgaaggtaggcgtttaagagctaagctgcgtaaagtctgctggtga

SEQ ID NO: 2586 - DNA, 84 bp, Artificial Sequence
  Synthetic
tatgaaccactaaggcgtccaccttgttggaggcggggtaaaaaagagagtttaagagctaagctgcgtaaagtctgctggtga

SEQ ID NO: 2587 - DNA, 84 bp, Artificial Sequence
  Synthetic
tatgaaccactaaggcgtccaccttgttggggtaaaaaagagagggcgagtttaagagctaagctgcgtaaagtctgctggtga

SEQ ID NO: 2588 - DNA, 84 bp, Artificial Sequence
  Synthetic
tatgaaccactaaggcgtccaccttgttggaggaggtcgagaccgaggggtttaagagctaagctgcgtaaagtctgctggtga

SEQ ID NO: 2589 - DNA, 84 bp, Artificial Sequence
  Synthetic
tatgaaccactaaggcgtccaccttgttggcttcgcctcctgacaggaagtttaagagctaagctgcgtaaagtctgctggtga

SEQ ID NO: 2590 - DNA, 84 bp, Artificial Sequence
  Synthetic
tatgaaccactaaggcgtccaccttgttggtcccccttcgcctcctgacgtttaagagctaagctgcgtaaagtctgctggtga

SEQ ID NO: 2591 - DNA, 84 bp, Artificial Sequence
  Synthetic
tatgaaccactaaggcgtccaccttgttggcccgcggctggggaaccaagtttaagagctaagctgcgtaaagtctgctggtga

SEQ ID NO: 2592 - DNA, 84 bp, Artificial Sequence
  Synthetic
tatgaaccactaaggcgtccaccttgttggcgacggttcgcaggggagggtttaagagctaagctgcgtaaagtctgctggtga

SEQ ID NO: 2593 - DNA, 84 bp, Artificial Sequence
  Synthetic
tatgaaccactaaggcgtccaccttgttggctcggtcgacggttcgcaggtttaagagctaagctgcgtaaagtctgctggtga

SEQ ID NO: 2594 - DNA, 84 bp, Artificial Sequence
  Synthetic
tatgaaccactaaggcgtccaccttgttggagagctcggcggctgggacgtttaagagctaagctgcgtaaagtctgctggtga

SEQ ID NO: 2595 - DNA, 84 bp, Artificial Sequence
  Synthetic
tatgaaccactaaggcgtccaccttgttggcggtggcggaggcgactaggtttaagagctaagctgcgtaaagtctgctggtga

SEQ ID NO: 2596 - DNA, 84 bp, Artificial Sequence
  Synthetic
tatgaaccactaaggcgtccaccttgttgggctcggcggctgggactgggtttaagagctaagctgcgtaaagtctgctggtga

SEQ ID NO: 2597 - DNA, 84 bp, Artificial Sequence
  Synthetic
tatgaaccactaaggcgtccaccttgttggcaggccccgtccacgatctgtttaagagctaagctgcgtaaagtctgctggtga

SEQ ID NO: 2598 - DNA, 84 bp, Artificial Sequence
  Synthetic
tatgaaccactaaggcgtccaccttgttggggatgaaggcggctttcaagtttaagagctaagctgcgtaaagtctgctggtga

SEQ ID NO: 2599 - DNA, 84 bp, Artificial Sequence
  Synthetic
tatgaaccactaaggcgtccaccttgttggtacccacagaggcccgccggtttaagagctaagctgcgtaaagtctgctggtga

SEQ ID NO: 2600 - DNA, 84 bp, Artificial Sequence
  Synthetic
tatgaaccactaaggcgtccaccttgttggagtttcgcgccaagatcacgtttaagagctaagctgcgtaaagtctgctggtga

SEQ ID NO: 2601 - DNA, 84 bp, Artificial Sequence
  Synthetic
tatgaaccactaaggcgtccaccttgttggcacgcggaatccccctcaggtttaagagctaagctgcgtaaagtctgctggtga

SEQ ID NO: 2602 - DNA, 84 bp, Artificial Sequence
  Synthetic
tatgaaccactaaggcgtccaccttgttggcaggctgtggtgcgaggtggtttaagagctaagctgcgtaaagtctgctggtga

SEQ ID NO: 2603 - DNA, 84 bp, Artificial Sequence
  Synthetic
tatgaaccactaaggcgtccaccttgttggctgactgcagtagccgcgggtttaagagctaagctgcgtaaagtctgctggtga

SEQ ID NO: 2604 - DNA, 84 bp, Artificial Sequence
  Synthetic
tatgaaccactaaggcgtccaccttgttgggtccggtagaggttctcgcgtttaagagctaagctgcgtaaagtctgctggtga

SEQ ID NO: 2605 - DNA, 84 bp, Artificial Sequence
  Synthetic
tatgaaccactaaggcgtccaccttgttggtcctcgtgggattcgttgggtttaagagctaagctgcgtaaagtctgctggtga

SEQ ID NO: 2606 - DNA, 84 bp, Artificial Sequence
  Synthetic
tatgaaccactaaggcgtccaccttgttggcggaggcgccatattggaggtttaagagctaagctgcgtaaagtctgctggtga

SEQ ID NO: 2607 - DNA, 84 bp, Artificial Sequence
  Synthetic
tatgaaccactaaggcgtccaccttgttgggagcgggtgctgctagcgggtttaagagctaagctgcgtaaagtctgctggtga

SEQ ID NO: 2608 - DNA, 84 bp, Artificial Sequence
  Synthetic
tatgaaccactaaggcgtccaccttgttgggggcgggcaagagcgcgaggtttaagagctaagctgcgtaaagtctgctggtga

SEQ ID NO: 2609 - DNA, 84 bp, Artificial Sequence
  Synthetic
tatgaaccactaaggcgtccaccttgttggcaatcgctgctcttaaagggtttaagagctaagctgcgtaaagtctgctggtga

SEQ ID NO: 2610 - DNA, 84 bp, Artificial Sequence
  Synthetic
tatgaaccactaaggcgtccaccttgttggcgtacttacctgggacccggtttaagagctaagctgcgtaaagtctgctggtga

SEQ ID NO: 2611 - DNA, 84 bp, Artificial Sequence
  Synthetic
tatgaaccactaaggcgtccaccttgttgggcaagaggagctcaactcggtttaagagctaagctgcgtaaagtctgctggtga

SEQ ID NO: 2612 - DNA, 84 bp, Artificial Sequence
  Synthetic
tatgaaccactaaggcgtccaccttgttggagccgcggttcgctctctggtttaagagctaagctgcgtaaagtctgctggtga

SEQ ID NO: 2613 - DNA, 84 bp, Artificial Sequence
  Synthetic
tatgaaccactaaggcgtccaccttgttggaggagcggagcagggacacgtttaagagctaagctgcgtaaagtctgctggtga

SEQ ID NO: 2614 - DNA, 84 bp, Artificial Sequence
  Synthetic
tatgaaccactaaggcgtccaccttgttggcgaaccgcggctccaccgtgtttaagagctaagctgcgtaaagtctgctggtga

SEQ ID NO: 2615 - DNA, 84 bp, Artificial Sequence
  Synthetic
tatgaaccactaaggcgtccaccttgttggagcacctctggggctatgggtttaagagctaagctgcgtaaagtctgctggtga

SEQ ID NO: 2616 - DNA, 84 bp, Artificial Sequence
  Synthetic
tatgaaccactaaggcgtccaccttgttggcggcgtgggagcacctctggtttaagagctaagctgcgtaaagtctgctggtga

SEQ ID NO: 2617 - DNA, 84 bp, Artificial Sequence
  Synthetic
tatgaaccactaaggcgtccaccttgttgggagtaagctgtggcggcgtgtttaagagctaagctgcgtaaagtctgctggtga

SEQ ID NO: 2618 - DNA, 84 bp, Artificial Sequence
  Synthetic
tatgaaccactaaggcgtccaccttgttggaagactcggagtgcgatgggtttaagagctaagctgcgtaaagtctgctggtga

SEQ ID NO: 2619 - DNA, 84 bp, Artificial Sequence
  Synthetic
tatgaaccactaaggcgtccaccttgttggaagttccaaggcccgcgctgtttaagagctaagctgcgtaaagtctgctggtga

SEQ ID NO: 2620 - DNA, 84 bp, Artificial Sequence
  Synthetic
tatgaaccactaaggcgtccaccttgttggcccgcgctgggaaaaaggtgtttaagagctaagctgcgtaaagtctgctggtga

SEQ ID NO: 2621 - DNA, 84 bp, Artificial Sequence
  Synthetic
tatgaaccactaaggcgtccaccttgttggcctcctacagcaccactacgtttaagagctaagctgcgtaaagtctgctggtga

SEQ ID NO: 2622 - DNA, 84 bp, Artificial Sequence
  Synthetic
tatgaaccactaaggcgtccaccttgttgggaggcgctggcaatggactgtttaagagctaagctgcgtaaagtctgctggtga

SEQ ID NO: 2623 - DNA, 84 bp, Artificial Sequence
  Synthetic
tatgaaccactaaggcgtccaccttgttgggccggggctgtacaagaaggtttaagagctaagctgcgtaaagtctgctggtga

SEQ ID NO: 2624 - DNA, 84 bp, Artificial Sequence
  Synthetic
tatgaaccactaaggcgtccaccttgttggtagcgggagggcagactctgtttaagagctaagctgcgtaaagtctgctggtga

SEQ ID NO: 2625 - DNA, 84 bp, Artificial Sequence
  Synthetic
tatgaaccactaaggcgtccaccttgttgggcggggcttgctgctgagggtttaagagctaagctgcgtaaagtctgctggtga

SEQ ID NO: 2626 - DNA, 84 bp, Artificial Sequence
  Synthetic
tatgaaccactaaggcgtccaccttgttggtcacccgtagcttcttccggtttaagagctaagctgcgtaaagtctgctggtga

SEQ ID NO: 2627 - DNA, 84 bp, Artificial Sequence
  Synthetic
tatgaaccactaaggcgtccaccttgttggaataagcgctatgggaggagtttaagagctaagctgcgtaaagtctgctggtga

SEQ ID NO: 2628 - DNA, 84 bp, Artificial Sequence
  Synthetic
tatgaaccactaaggcgtccaccttgttggagcggccatagtggaaggggtttaagagctaagctgcgtaaagtctgctggtga

SEQ ID NO: 2629 - DNA, 84 bp, Artificial Sequence
  Synthetic
tatgaaccactaaggcgtccaccttgttgggtgaggcaataagcgctatgtttaagagctaagctgcgtaaagtctgctggtga

SEQ ID NO: 2630 - DNA, 84 bp, Artificial Sequence
  Synthetic
tatgaaccactaaggcgtccaccttgttggcggaggcgggggtacgacggtttaagagctaagctgcgtaaagtctgctggtga

SEQ ID NO: 2631 - DNA, 84 bp, Artificial Sequence
  Synthetic
tatgaaccactaaggcgtccaccttgttgggactccctccgcaccccgggtttaagagctaagctgcgtaaagtctgctggtga

SEQ ID NO: 2632 - DNA, 84 bp, Artificial Sequence
  Synthetic
tatgaaccactaaggcgtccaccttgttgggggtacgacggggagcactgtttaagagctaagctgcgtaaagtctgctggtga

SEQ ID NO: 2633 - DNA, 84 bp, Artificial Sequence
  Synthetic
tatgaaccactaaggcgtccaccttgttggcggagagcagaagcggtaagtttaagagctaagctgcgtaaagtctgctggtga

SEQ ID NO: 2634 - DNA, 84 bp, Artificial Sequence
  Synthetic
tatgaaccactaaggcgtccaccttgttggcggctcggttctgtctaccgtttaagagctaagctgcgtaaagtctgctggtga

SEQ ID NO: 2635 - DNA, 84 bp, Artificial Sequence
  Synthetic
tatgaaccactaaggcgtccaccttgttggcgtcgccgtcagggccccagtttaagagctaagctgcgtaaagtctgctggtga

SEQ ID NO: 2636 - DNA, 84 bp, Artificial Sequence
  Synthetic
tatgaaccactaaggcgtccaccttgttggcccagccctagggccgcatgtttaagagctaagctgcgtaaagtctgctggtga

SEQ ID NO: 2637 - DNA, 84 bp, Artificial Sequence
  Synthetic
tatgaaccactaaggcgtccaccttgttggcctcccccgcagcggagaggtttaagagctaagctgcgtaaagtctgctggtga

SEQ ID NO: 2638 - DNA, 84 bp, Artificial Sequence
  Synthetic
tatgaaccactaaggcgtccaccttgttgggcctgggaaggttccgccagtttaagagctaagctgcgtaaagtctgctggtga

SEQ ID NO: 2639 - DNA, 84 bp, Artificial Sequence
  Synthetic
tatgaaccactaaggcgtccaccttgttggcaggcgcccgagcccccgggtttaagagctaagctgcgtaaagtctgctggtga

SEQ ID NO: 2640 - DNA, 84 bp, Artificial Sequence
  Synthetic
tatgaaccactaaggcgtccaccttgttggcgactaccagagcccgagagtttaagagctaagctgcgtaaagtctgctggtga

SEQ ID NO: 2641 - DNA, 84 bp, Artificial Sequence
  Synthetic
tatgaaccactaaggcgtccaccttgttggctcctgccgtgctccgggggtttaagagctaagctgcgtaaagtctgctggtga

SEQ ID NO: 2642 - DNA, 84 bp, Artificial Sequence
  Synthetic
tatgaaccactaaggcgtccaccttgttgggccagggtcggctactggggtttaagagctaagctgcgtaaagtctgctggtga

SEQ ID NO: 2643 - DNA, 84 bp, Artificial Sequence
  Synthetic
tatgaaccactaaggcgtccaccttgttgggcgggactaaggaacctgagtttaagagctaagctgcgtaaagtctgctggtga

SEQ ID NO: 2644 - DNA, 84 bp, Artificial Sequence
  Synthetic
tatgaaccactaaggcgtccaccttgttgggtgagtccggtgcccgggggtttaagagctaagctgcgtaaagtctgctggtga

SEQ ID NO: 2645 - DNA, 84 bp, Artificial Sequence
  Synthetic
tatgaaccactaaggcgtccaccttgttggcctggcgcagagcagcggggtttaagagctaagctgcgtaaagtctgctggtga

SEQ ID NO: 2646 - DNA, 84 bp, Artificial Sequence
  Synthetic
tatgaaccactaaggcgtccaccttgttgggagatgccccaaactgacagtttaagagctaagctgcgtaaagtctgctggtga

SEQ ID NO: 2647 - DNA, 84 bp, Artificial Sequence
  Synthetic
tatgaaccactaaggcgtccaccttgttgggagctcactgtctccaagagtttaagagctaagctgcgtaaagtctgctggtga

SEQ ID NO: 2648 - DNA, 84 bp, Artificial Sequence
  Synthetic
tatgaaccactaaggcgtccaccttgttggacaacagggggacacaaaagtttaagagctaagctgcgtaaagtctgctggtga

SEQ ID NO: 2649 - DNA, 84 bp, Artificial Sequence
  Synthetic
tatgaaccactaaggcgtccaccttgttggacagggggacacaaaatgggtttaagagctaagctgcgtaaagtctgctggtga

SEQ ID NO: 2650 - DNA, 84 bp, Artificial Sequence
  Synthetic
tatgaaccactaaggcgtccaccttgttggtgtcaacgacaacaacagggtttaagagctaagctgcgtaaagtctgctggtga

SEQ ID NO: 2651 - DNA, 84 bp, Artificial Sequence
  Synthetic
tatgaaccactaaggcgtccaccttgttggactgatacagaggccgccagtttaagagctaagctgcgtaaagtctgctggtga

SEQ ID NO: 2652 - DNA, 84 bp, Artificial Sequence
  Synthetic
tatgaaccactaaggcgtccaccttgttggagggatcgtccgcaggattgtttaagagctaagctgcgtaaagtctgctggtga

SEQ ID NO: 2653 - DNA, 84 bp, Artificial Sequence
  Synthetic
tatgaaccactaaggcgtccaccttgttggtgtatcagtcccaatcctggtttaagagctaagctgcgtaaagtctgctggtga

SEQ ID NO: 2654 - DNA, 84 bp, Artificial Sequence
  Synthetic
tatgaaccactaaggcgtccaccttgttggacttcccttcccgcgatgggtttaagagctaagctgcgtaaagtctgctggtga

SEQ ID NO: 2655 - DNA, 84 bp, Artificial Sequence
  Synthetic
tatgaaccactaaggcgtccaccttgttgggcacagggagctgctgcgggtttaagagctaagctgcgtaaagtctgctggtga

SEQ ID NO: 2656 - DNA, 84 bp, Artificial Sequence
  Synthetic
tatgaaccactaaggcgtccaccttgttgggttgcggcggggacttcaggtttaagagctaagctgcgtaaagtctgctggtga

SEQ ID NO: 2657 - DNA, 84 bp, Artificial Sequence
  Synthetic
tatgaaccactaaggcgtccaccttgttggctgcaggagaaggagtcccgtttaagagctaagctgcgtaaagtctgctggtga

SEQ ID NO: 2658 - DNA, 84 bp, Artificial Sequence
  Synthetic
tatgaaccactaaggcgtccaccttgttggggttctgacagtaaatctagtttaagagctaagctgcgtaaagtctgctggtga

SEQ ID NO: 2659 - DNA, 84 bp, Artificial Sequence
  Synthetic
tatgaaccactaaggcgtccaccttgttggtcaggatgtaaaagacgaagtttaagagctaagctgcgtaaagtctgctggtga

SEQ ID NO: 2660 - DNA, 84 bp, Artificial Sequence
  Synthetic
tatgaaccactaaggcgtccaccttgttggaagcagtaggatcggccaggtttaagagctaagctgcgtaaagtctgctggtga

SEQ ID NO: 2661 - DNA, 84 bp, Artificial Sequence
  Synthetic
tatgaaccactaaggcgtccaccttgttggcagatgccgactttagagggtttaagagctaagctgcgtaaagtctgctggtga

SEQ ID NO: 2662 - DNA, 84 bp, Artificial Sequence
  Synthetic
tatgaaccactaaggcgtccaccttgttggcgcctgctggaaaagcagtgtttaagagctaagctgcgtaaagtctgctggtga

SEQ ID NO: 2663 - DNA, 84 bp, Artificial Sequence
  Synthetic
tatgaaccactaaggcgtccaccttgttggcaccccgagggaccccctagtttaagagctaagctgcgtaaagtctgctggtga

SEQ ID NO: 2664 - DNA, 84 bp, Artificial Sequence
  Synthetic
tatgaaccactaaggcgtccaccttgttgggccctggcctcaggcggtagtttaagagctaagctgcgtaaagtctgctggtga

SEQ ID NO: 2665 - DNA, 84 bp, Artificial Sequence
  Synthetic
tatgaaccactaaggcgtccaccttgttggtggagccgaggccccccgagtttaagagctaagctgcgtaaagtctgctggtga

SEQ ID NO: 2666 - DNA, 84 bp, Artificial Sequence
  Synthetic
tatgaaccactaaggcgtccaccttgttggaatgccgtggcgcgaacttgtttaagagctaagctgcgtaaagtctgctggtga

SEQ ID NO: 2667 - DNA, 84 bp, Artificial Sequence
  Synthetic
tatgaaccactaaggcgtccaccttgttggcgcgaacttgggactgcaggtttaagagctaagctgcgtaaagtctgctggtga

SEQ ID NO: 2668 - DNA, 84 bp, Artificial Sequence
  Synthetic
tatgaaccactaaggcgtccaccttgttggcgtctgcgcgcgaatgccggtttaagagctaagctgcgtaaagtctgctggtga

SEQ ID NO: 2669 - DNA, 84 bp, Artificial Sequence
  Synthetic
tatgaaccactaaggcgtccaccttgttggcaggcgctccaaccgtcgtgtttaagagctaagctgcgtaaagtctgctggtga

SEQ ID NO: 2670 - DNA, 84 bp, Artificial Sequence
  Synthetic
tatgaaccactaaggcgtccaccttgttggcggctccggcgctcaccgtgtttaagagctaagctgcgtaaagtctgctggtga

SEQ ID NO: 2671 - DNA, 84 bp, Artificial Sequence
  Synthetic
tatgaaccactaaggcgtccaccttgttgggagcaagttccgaggcctagtttaagagctaagctgcgtaaagtctgctggtga

SEQ ID NO: 2672 - DNA, 84 bp, Artificial Sequence
  Synthetic
tatgaaccactaaggcgtccaccttgttggcgtcaggtgggaagggtgtgtttaagagctaagctgcgtaaagtctgctggtga

SEQ ID NO: 2673 - DNA, 84 bp, Artificial Sequence
  Synthetic
tatgaaccactaaggcgtccaccttgttgggcgccagcttccggcttaggtttaagagctaagctgcgtaaagtctgctggtga

SEQ ID NO: 2674 - DNA, 84 bp, Artificial Sequence
  Synthetic
tatgaaccactaaggcgtccaccttgttggttcaggcttgacgtcaggtgtttaagagctaagctgcgtaaagtctgctggtga

SEQ ID NO: 2675 - DNA, 84 bp, Artificial Sequence
  Synthetic
tatgaaccactaaggcgtccaccttgttggatccctaggtcctggagcagtttaagagctaagctgcgtaaagtctgctggtga

SEQ ID NO: 2676 - DNA, 84 bp, Artificial Sequence
  Synthetic
tatgaaccactaaggcgtccaccttgttggggccaagatccctaggtccgtttaagagctaagctgcgtaaagtctgctggtga

SEQ ID NO: 2677 - DNA, 84 bp, Artificial Sequence
  Synthetic
tatgaaccactaaggcgtccaccttgttgggtggaaggccaagatccctgtttaagagctaagctgcgtaaagtctgctggtga

SEQ ID NO: 2678 - DNA, 84 bp, Artificial Sequence
  Synthetic
tatgaaccactaaggcgtccaccttgttgggccgaggccccgggttgaggtttaagagctaagctgcgtaaagtctgctggtga

SEQ ID NO: 2679 - DNA, 84 bp, Artificial Sequence
  Synthetic
tatgaaccactaaggcgtccaccttgttgggccgcggggagccaccgacgtttaagagctaagctgcgtaaagtctgctggtga

SEQ ID NO: 2680 - DNA, 84 bp, Artificial Sequence
  Synthetic
tatgaaccactaaggcgtccaccttgttgggcgggaggcgcgatcggtcgtttaagagctaagctgcgtaaagtctgctggtga

SEQ ID NO: 2681 - DNA, 84 bp, Artificial Sequence
  Synthetic
tatgaaccactaaggcgtccaccttgttggagcgccaggtaccacgagtgtttaagagctaagctgcgtaaagtctgctggtga

SEQ ID NO: 2682 - DNA, 84 bp, Artificial Sequence
  Synthetic
tatgaaccactaaggcgtccaccttgttgggaagcaggcgcgcgagacggtttaagagctaagctgcgtaaagtctgctggtga

SEQ ID NO: 2683 - DNA, 84 bp, Artificial Sequence
  Synthetic
tatgaaccactaaggcgtccaccttgttggtggcggcggcttgttgttggtttaagagctaagctgcgtaaagtctgctggtga

SEQ ID NO: 2684 - DNA, 84 bp, Artificial Sequence
  Synthetic
tatgaaccactaaggcgtccaccttgttggactccgccatagagcaggggtttaagagctaagctgcgtaaagtctgctggtga

SEQ ID NO: 2685 - DNA, 84 bp, Artificial Sequence
  Synthetic
tatgaaccactaaggcgtccaccttgttggcgggtctccgggattccaagtttaagagctaagctgcgtaaagtctgctggtga

SEQ ID NO: 2686 - DNA, 84 bp, Artificial Sequence
  Synthetic
tatgaaccactaaggcgtccaccttgttgggattccaagggctcggttagtttaagagctaagctgcgtaaagtctgctggtga

SEQ ID NO: 2687 - DNA, 84 bp, Artificial Sequence
  Synthetic
tatgaaccactaaggcgtccaccttgttggccgacagccccgaccttctgtttaagagctaagctgcgtaaagtctgctggtga

SEQ ID NO: 2688 - DNA, 84 bp, Artificial Sequence
  Synthetic
tatgaaccactaaggcgtccaccttgttggcggccgcgcagggcctcaagtttaagagctaagctgcgtaaagtctgctggtga

SEQ ID NO: 2689 - DNA, 84 bp, Artificial Sequence
  Synthetic
tatgaaccactaaggcgtccaccttgttgggaacagccgcggcaagtgggtttaagagctaagctgcgtaaagtctgctggtga

SEQ ID NO: 2690 - DNA, 84 bp, Artificial Sequence
  Synthetic
tatgaaccactaaggcgtccaccttgttggcccagcgccgcaacgcccagtttaagagctaagctgcgtaaagtctgctggtga

SEQ ID NO: 2691 - DNA, 84 bp, Artificial Sequence
  Synthetic
tatgaaccactaaggcgtccaccttgttggccggtgccgtgagctgaaggtttaagagctaagctgcgtaaagtctgctggtga

SEQ ID NO: 2692 - DNA, 84 bp, Artificial Sequence
  Synthetic
tatgaaccactaaggcgtccaccttgttgggccgcaacgcccagggtgtgtttaagagctaagctgcgtaaagtctgctggtga

SEQ ID NO: 2693 - DNA, 84 bp, Artificial Sequence
  Synthetic
tatgaaccactaaggcgtccaccttgttgggggcgcgatctggatttgggtttaagagctaagctgcgtaaagtctgctggtga

SEQ ID NO: 2694 - DNA, 84 bp, Artificial Sequence
  Synthetic
tatgaaccactaaggcgtccaccttgttgggggcgtgcgtgtgaccctcgtttaagagctaagctgcgtaaagtctgctggtga

SEQ ID NO: 2695 - DNA, 84 bp, Artificial Sequence
  Synthetic
tatgaaccactaaggcgtccaccttgttgggtgaacgaagaaggcgtccgtttaagagctaagctgcgtaaagtctgctggtga

SEQ ID NO: 2696 - DNA, 84 bp, Artificial Sequence
  Synthetic
tatgaaccactaaggcgtccaccttgttgggatcgtggtactgctatgggtttaagagctaagctgcgtaaagtctgctggtga

SEQ ID NO: 2697 - DNA, 84 bp, Artificial Sequence
  Synthetic
tatgaaccactaaggcgtccaccttgttgggtagtggcggagaggatcggtttaagagctaagctgcgtaaagtctgctggtga

SEQ ID NO: 2698 - DNA, 84 bp, Artificial Sequence
  Synthetic
tatgaaccactaaggcgtccaccttgttggtgttgctgtagtggcggaggtttaagagctaagctgcgtaaagtctgctggtga

SEQ ID NO: 2699 - DNA, 84 bp, Artificial Sequence
  Synthetic
tatgaaccactaaggcgtccaccttgttggcgtggcgcaggcgaatcctgtttaagagctaagctgcgtaaagtctgctggtga

SEQ ID NO: 2700 - DNA, 84 bp, Artificial Sequence
  Synthetic
tatgaaccactaaggcgtccaccttgttgggacttgtggcggtcgagcggtttaagagctaagctgcgtaaagtctgctggtga

SEQ ID NO: 2701 - DNA, 84 bp, Artificial Sequence
  Synthetic
tatgaaccactaaggcgtccaccttgttgggcaaatatggacctcgcgggtttaagagctaagctgcgtaaagtctgctggtga

SEQ ID NO: 2702 - DNA, 84 bp, Artificial Sequence
  Synthetic
tatgaaccactaaggcgtccaccttgttggatcgctgccgagggccgtggtttaagagctaagctgcgtaaagtctgctggtga

SEQ ID NO: 2703 - DNA, 84 bp, Artificial Sequence
  Synthetic
tatgaaccactaaggcgtccaccttgttggccgcgcttggcgggctcaggtttaagagctaagctgcgtaaagtctgctggtga

SEQ ID NO: 2704 - DNA, 84 bp, Artificial Sequence
  Synthetic
tatgaaccactaaggcgtccaccttgttgggaggtcccggtgaaatcaggtttaagagctaagctgcgtaaagtctgctggtga

SEQ ID NO: 2705 - DNA, 84 bp, Artificial Sequence
  Synthetic
tatgaaccactaaggcgtccaccttgttggcggaagtagacgtacctcagtttaagagctaagctgcgtaaagtctgctggtga

SEQ ID NO: 2706 - DNA, 84 bp, Artificial Sequence
  Synthetic
tatgaaccactaaggcgtccaccttgttgggccggaccgggttagaatcgtttaagagctaagctgcgtaaagtctgctggtga

SEQ ID NO: 2707 - DNA, 84 bp, Artificial Sequence
  Synthetic
tatgaaccactaaggcgtccaccttgttgggtcgccgcggagaaattgtgtttaagagctaagctgcgtaaagtctgctggtga

SEQ ID NO: 2708 - DNA, 84 bp, Artificial Sequence
  Synthetic
tatgaaccactaaggcgtccaccttgttgggcgcgcggggacttaaagtgtttaagagctaagctgcgtaaagtctgctggtga

SEQ ID NO: 2709 - DNA, 84 bp, Artificial Sequence
  Synthetic
tatgaaccactaaggcgtccaccttgttgggctgccggcaacggatagagtttaagagctaagctgcgtaaagtctgctggtga

SEQ ID NO: 2710 - DNA, 84 bp, Artificial Sequence
  Synthetic
tatgaaccactaaggcgtccaccttgttgggggttgcgcgttgcagtcggtttaagagctaagctgcgtaaagtctgctggtga

SEQ ID NO: 2711 - DNA, 84 bp, Artificial Sequence
  Synthetic
tatgaaccactaaggcgtccaccttgttgggaagcagccaagctcgccggtttaagagctaagctgcgtaaagtctgctggtga

SEQ ID NO: 2712 - DNA, 84 bp, Artificial Sequence
  Synthetic
tatgaaccactaaggcgtccaccttgttgggcaagaagccgagcccgaggtttaagagctaagctgcgtaaagtctgctggtga

SEQ ID NO: 2713 - DNA, 84 bp, Artificial Sequence
  Synthetic
tatgaaccactaaggcgtccaccttgttgggccctgtgtgtcggaaagagtttaagagctaagctgcgtaaagtctgctggtga

SEQ ID NO: 2714 - DNA, 84 bp, Artificial Sequence
  Synthetic
tatgaaccactaaggcgtccaccttgttggaacatggcgatgcacaacagtttaagagctaagctgcgtaaagtctgctggtga

SEQ ID NO: 2715 - DNA, 84 bp, Artificial Sequence
  Synthetic
tatgaaccactaaggcgtccaccttgttgggccgggtgtccgggatctggtttaagagctaagctgcgtaaagtctgctggtga

SEQ ID NO: 2716 - DNA, 84 bp, Artificial Sequence
  Synthetic
tatgaaccactaaggcgtccaccttgttgggggtgtccgggatctgcgggtttaagagctaagctgcgtaaagtctgctggtga

SEQ ID NO: 2717 - DNA, 84 bp, Artificial Sequence
  Synthetic
tatgaaccactaaggcgtccaccttgttggataaacaggaagcgggcgggtttaagagctaagctgcgtaaagtctgctggtga

SEQ ID NO: 2718 - DNA, 84 bp, Artificial Sequence
  Synthetic
tatgaaccactaaggcgtccaccttgttgggcagcagagggagagctcggtttaagagctaagctgcgtaaagtctgctggtga

SEQ ID NO: 2719 - DNA, 84 bp, Artificial Sequence
  Synthetic
tatgaaccactaaggcgtccaccttgttgggcgccccagcttaaagccggtttaagagctaagctgcgtaaagtctgctggtga

SEQ ID NO: 2720 - DNA, 84 bp, Artificial Sequence
  Synthetic
tatgaaccactaaggcgtccaccttgttggcgacgcccgcaggtcctcggtttaagagctaagctgcgtaaagtctgctggtga

SEQ ID NO: 2721 - DNA, 84 bp, Artificial Sequence
  Synthetic
tatgaaccactaaggcgtccaccttgttgggaaaggctgggcaacacctgtttaagagctaagctgcgtaaagtctgctggtga

SEQ ID NO: 2722 - DNA, 84 bp, Artificial Sequence
  Synthetic
tatgaaccactaaggcgtccaccttgttggtgcgcaccgcgaggacctggtttaagagctaagctgcgtaaagtctgctggtga

SEQ ID NO: 2723 - DNA, 84 bp, Artificial Sequence
  Synthetic
tatgaaccactaaggcgtccaccttgttggcggcggctggacgagacaggtttaagagctaagctgcgtaaagtctgctggtga

SEQ ID NO: 2724 - DNA, 84 bp, Artificial Sequence
  Synthetic
tatgaaccactaaggcgtccaccttgttggcgtggcaggggttattcgggtttaagagctaagctgcgtaaagtctgctggtga

SEQ ID NO: 2725 - DNA, 84 bp, Artificial Sequence
  Synthetic
tatgaaccactaaggcgtccaccttgttggggcacgtcagggaacccgggtttaagagctaagctgcgtaaagtctgctggtga

SEQ ID NO: 2726 - DNA, 84 bp, Artificial Sequence
  Synthetic
tatgaaccactaaggcgtccaccttgttggcgtccgaggcggttggtgtgtttaagagctaagctgcgtaaagtctgctggtga

SEQ ID NO: 2727 - DNA, 84 bp, Artificial Sequence
  Synthetic
tatgaaccactaaggcgtccaccttgttgggcacgagcctcaagatccagtttaagagctaagctgcgtaaagtctgctggtga

SEQ ID NO: 2728 - DNA, 84 bp, Artificial Sequence
  Synthetic
tatgaaccactaaggcgtccaccttgttggtctccgacaccaaccgcctgtttaagagctaagctgcgtaaagtctgctggtga

SEQ ID NO: 2729 - DNA, 84 bp, Artificial Sequence
  Synthetic
tatgaaccactaaggcgtccaccttgttggaacgcgaactagagaccgtgtttaagagctaagctgcgtaaagtctgctggtga

SEQ ID NO: 2730 - DNA, 84 bp, Artificial Sequence
  Synthetic
tatgaaccactaaggcgtccaccttgttgggagggagcggcctcagtacgtttaagagctaagctgcgtaaagtctgctggtga

SEQ ID NO: 2731 - DNA, 84 bp, Artificial Sequence
  Synthetic
tatgaaccactaaggcgtccaccttgttggtcgtgcacgaggccccatagtttaagagctaagctgcgtaaagtctgctggtga

SEQ ID NO: 2732 - DNA, 84 bp, Artificial Sequence
  Synthetic
tatgaaccactaaggcgtccaccttgttggaaatgtgagcgggtacgacgtttaagagctaagctgcgtaaagtctgctggtga

SEQ ID NO: 2733 - DNA, 84 bp, Artificial Sequence
  Synthetic
tatgaaccactaaggcgtccaccttgttggagccgggtacgcgggatacgtttaagagctaagctgcgtaaagtctgctggtga

SEQ ID NO: 2734 - DNA, 84 bp, Artificial Sequence
  Synthetic
tatgaaccactaaggcgtccaccttgttgggaacgctccctccccggctgtttaagagctaagctgcgtaaagtctgctggtga

SEQ ID NO: 2735 - DNA, 84 bp, Artificial Sequence
  Synthetic
tatgaaccactaaggcgtccaccttgttggctgccaagcgcctgttggtgtttaagagctaagctgcgtaaagtctgctggtga

SEQ ID NO: 2736 - DNA, 84 bp, Artificial Sequence
  Synthetic
tatgaaccactaaggcgtccaccttgttggggcgcctgcgagagtctgtgtttaagagctaagctgcgtaaagtctgctggtga

SEQ ID NO: 2737 - DNA, 84 bp, Artificial Sequence
  Synthetic
tatgaaccactaaggcgtccaccttgttggtcccttcgcgaaagagcacgtttaagagctaagctgcgtaaagtctgctggtga

SEQ ID NO: 2738 - DNA, 84 bp, Artificial Sequence
  Synthetic
tatgaaccactaaggcgtccaccttgttggccggcccaggatgtagagcgtttaagagctaagctgcgtaaagtctgctggtga

SEQ ID NO: 2739 - DNA, 84 bp, Artificial Sequence
  Synthetic
tatgaaccactaaggcgtccaccttgttggctaacggcgcaggagataggtttaagagctaagctgcgtaaagtctgctggtga

SEQ ID NO: 2740 - DNA, 84 bp, Artificial Sequence
  Synthetic
tatgaaccactaaggcgtccaccttgttggctgcgggcgctggcaaatcgtttaagagctaagctgcgtaaagtctgctggtga

SEQ ID NO: 2741 - DNA, 84 bp, Artificial Sequence
  Synthetic
tatgaaccactaaggcgtccaccttgttggcgaccacggaagcacccctgtttaagagctaagctgcgtaaagtctgctggtga

SEQ ID NO: 2742 - DNA, 84 bp, Artificial Sequence
  Synthetic
tatgaaccactaaggcgtccaccttgttggcgctccgccccggtcctaggtttaagagctaagctgcgtaaagtctgctggtga

SEQ ID NO: 2743 - DNA, 84 bp, Artificial Sequence
  Synthetic
tatgaaccactaaggcgtccaccttgttggtgggactcggaccccggcggtttaagagctaagctgcgtaaagtctgctggtga

SEQ ID NO: 2744 - DNA, 84 bp, Artificial Sequence
  Synthetic
tatgaaccactaaggcgtccaccttgttggagtctgtcggtcagaccaagtttaagagctaagctgcgtaaagtctgctggtga

SEQ ID NO: 2745 - DNA, 84 bp, Artificial Sequence
  Synthetic
tatgaaccactaaggcgtccaccttgttggcagttccggtgggagaacggtttaagagctaagctgcgtaaagtctgctggtga

SEQ ID NO: 2746 - DNA, 84 bp, Artificial Sequence
  Synthetic
tatgaaccactaaggcgtccaccttgttggctccacccggaccagggtagtttaagagctaagctgcgtaaagtctgctggtga

SEQ ID NO: 2747 - DNA, 84 bp, Artificial Sequence
  Synthetic
tatgaaccactaaggcgtccaccttgttgggccgtaaacctgaattccggtttaagagctaagctgcgtaaagtctgctggtga

SEQ ID NO: 2748 - DNA, 84 bp, Artificial Sequence
  Synthetic
tatgaaccactaaggcgtccaccttgttggccgtgaaaagaaaacaacagtttaagagctaagctgcgtaaagtctgctggtga

SEQ ID NO: 2749 - DNA, 84 bp, Artificial Sequence
  Synthetic
tatgaaccactaaggcgtccaccttgttggtgaattccgcgggagagaagtttaagagctaagctgcgtaaagtctgctggtga

SEQ ID NO: 2750 - DNA, 84 bp, Artificial Sequence
  Synthetic
tatgaaccactaaggcgtccaccttgttggagcctgggcgctcaccgacgtttaagagctaagctgcgtaaagtctgctggtga

SEQ ID NO: 2751 - DNA, 84 bp, Artificial Sequence
  Synthetic
tatgaaccactaaggcgtccaccttgttggcgagcaaggagcccccggcgtttaagagctaagctgcgtaaagtctgctggtga

SEQ ID NO: 2752 - DNA, 84 bp, Artificial Sequence
  Synthetic
tatgaaccactaaggcgtccaccttgttggcttgtggcccagcatggcggtttaagagctaagctgcgtaaagtctgctggtga

SEQ ID NO: 2753 - DNA, 84 bp, Artificial Sequence
  Synthetic
tatgaaccactaaggcgtccaccttgttggaggtgaggaggtttcgacagtttaagagctaagctgcgtaaagtctgctggtga

SEQ ID NO: 2754 - DNA, 84 bp, Artificial Sequence
  Synthetic
tatgaaccactaaggcgtccaccttgttggggaggtgttcaagacccaggtttaagagctaagctgcgtaaagtctgctggtga

SEQ ID NO: 2755 - DNA, 84 bp, Artificial Sequence
  Synthetic
tatgaaccactaaggcgtccaccttgttggtttcttcaaccaggaggtggtttaagagctaagctgcgtaaagtctgctggtga

SEQ ID NO: 2756 - DNA, 84 bp, Artificial Sequence
  Synthetic
tatgaaccactaaggcgtccaccttgttggcgcagacgcctgggaactggtttaagagctaagctgcgtaaagtctgctggtga

SEQ ID NO: 2757 - DNA, 84 bp, Artificial Sequence
  Synthetic
tatgaaccactaaggcgtccaccttgttggcttccggcgagacatggcagtttaagagctaagctgcgtaaagtctgctggtga

SEQ ID NO: 2758 - DNA, 84 bp, Artificial Sequence
  Synthetic
tatgaaccactaaggcgtccaccttgttgggcaggcttccggcgagacagtttaagagctaagctgcgtaaagtctgctggtga

SEQ ID NO: 2759 - DNA, 84 bp, Artificial Sequence
  Synthetic
tatgaaccactaaggcgtccaccttgttggccctgacccgagaagtatggtttaagagctaagctgcgtaaagtctgctggtga

SEQ ID NO: 2760 - DNA, 84 bp, Artificial Sequence
  Synthetic
tatgaaccactaaggcgtccaccttgttggcggcgcagcttctgtagttgtttaagagctaagctgcgtaaagtctgctggtga

SEQ ID NO: 2761 - DNA, 84 bp, Artificial Sequence
  Synthetic
tatgaaccactaaggcgtccaccttgttggtgtagttgggctactggaggtttaagagctaagctgcgtaaagtctgctggtga

SEQ ID NO: 2762 - DNA, 84 bp, Artificial Sequence
  Synthetic
tatgaaccactaaggcgtccaccttgttggaacctgagtcgctacaggtgtttaagagctaagctgcgtaaagtctgctggtga

SEQ ID NO: 2763 - DNA, 84 bp, Artificial Sequence
  Synthetic
tatgaaccactaaggcgtccaccttgttggcacagaggaggccggggtagtttaagagctaagctgcgtaaagtctgctggtga

SEQ ID NO: 2764 - DNA, 84 bp, Artificial Sequence
  Synthetic
tatgaaccactaaggcgtccaccttgttggcagtaacctgagtcgctacgtttaagagctaagctgcgtaaagtctgctggtga

SEQ ID NO: 2765 - DNA, 84 bp, Artificial Sequence
  Synthetic
tatgaaccactaaggcgtccaccttgttggaggagccgcgcggtagatggtttaagagctaagctgcgtaaagtctgctggtga

SEQ ID NO: 2766 - DNA, 84 bp, Artificial Sequence
  Synthetic
tatgaaccactaaggcgtccaccttgttggggagctccgtccgacagaagtttaagagctaagctgcgtaaagtctgctggtga

SEQ ID NO: 2767 - DNA, 84 bp, Artificial Sequence
  Synthetic
tatgaaccactaaggcgtccaccttgttggtccgtccgacagaacggttgtttaagagctaagctgcgtaaagtctgctggtga

SEQ ID NO: 2768 - DNA, 84 bp, Artificial Sequence
  Synthetic
tatgaaccactaaggcgtccaccttgttggaaggagccgggggccgcgagtttaagagctaagctgcgtaaagtctgctggtga

SEQ ID NO: 2769 - DNA, 84 bp, Artificial Sequence
  Synthetic
tatgaaccactaaggcgtccaccttgttgggccgggcataaaggcggtggtttaagagctaagctgcgtaaagtctgctggtga

SEQ ID NO: 2770 - DNA, 84 bp, Artificial Sequence
  Synthetic
tatgaaccactaaggcgtccaccttgttggtcggggccgggcataaagggtttaagagctaagctgcgtaaagtctgctggtga

SEQ ID NO: 2771 - DNA, 84 bp, Artificial Sequence
  Synthetic
tatgaaccactaaggcgtccaccttgttggcggaaggaggcgaaccctggtttaagagctaagctgcgtaaagtctgctggtga

SEQ ID NO: 2772 - DNA, 84 bp, Artificial Sequence
  Synthetic
tatgaaccactaaggcgtccaccttgttggggatgaaccgcgacggctggtttaagagctaagctgcgtaaagtctgctggtga

SEQ ID NO: 2773 - DNA, 84 bp, Artificial Sequence
  Synthetic
tatgaaccactaaggcgtccaccttgttgggggccgggatgaaccgcgagtttaagagctaagctgcgtaaagtctgctggtga

SEQ ID NO: 2774 - DNA, 84 bp, Artificial Sequence
  Synthetic
tatgaaccactaaggcgtccaccttgttggcatgtaccgggtcggaggtgtttaagagctaagctgcgtaaagtctgctggtga

SEQ ID NO: 2775 - DNA, 84 bp, Artificial Sequence
  Synthetic
tatgaaccactaaggcgtccaccttgttggctgctgcctcgccacgggggtttaagagctaagctgcgtaaagtctgctggtga

SEQ ID NO: 2776 - DNA, 84 bp, Artificial Sequence
  Synthetic
tatgaaccactaaggcgtccaccttgttgggccaactgccgggagccaagtttaagagctaagctgcgtaaagtctgctggtga

SEQ ID NO: 2777 - DNA, 84 bp, Artificial Sequence
  Synthetic
tatgaaccactaaggcgtccaccttgttggacggggccccaaacacagggtttaagagctaagctgcgtaaagtctgctggtga

SEQ ID NO: 2778 - DNA, 84 bp, Artificial Sequence
  Synthetic
tatgaaccactaaggcgtccaccttgttggcacagggggcactaacgaggtttaagagctaagctgcgtaaagtctgctggtga

SEQ ID NO: 2779 - DNA, 84 bp, Artificial Sequence
  Synthetic
tatgaaccactaaggcgtccaccttgttggtggggccccgtgatctcaagtttaagagctaagctgcgtaaagtctgctggtga

SEQ ID NO: 2780 - DNA, 84 bp, Artificial Sequence
  Synthetic
tatgaaccactaaggcgtccaccttgttggtgaagacagcagaacacgggtttaagagctaagctgcgtaaagtctgctggtga

SEQ ID NO: 2781 - DNA, 84 bp, Artificial Sequence
  Synthetic
tatgaaccactaaggcgtccaccttgttggctcgggctcatagttctaggtttaagagctaagctgcgtaaagtctgctggtga

SEQ ID NO: 2782 - DNA, 84 bp, Artificial Sequence
  Synthetic
tatgaaccactaaggcgtccaccttgttgggaggctcctcaagcttcaggtttaagagctaagctgcgtaaagtctgctggtga

SEQ ID NO: 2783 - DNA, 84 bp, Artificial Sequence
  Synthetic
tatgaaccactaaggcgtccaccttgttggcaaagcttcccaccctcccgtttaagagctaagctgcgtaaagtctgctggtga

SEQ ID NO: 2784 - DNA, 84 bp, Artificial Sequence
  Synthetic
tatgaaccactaaggcgtccaccttgttgggcacagcgggcggtggagtgtttaagagctaagctgcgtaaagtctgctggtga

SEQ ID NO: 2785 - DNA, 84 bp, Artificial Sequence
  Synthetic
tatgaaccactaaggcgtccaccttgttggtgtgacagcgaaacgggaggtttaagagctaagctgcgtaaagtctgctggtga

SEQ ID NO: 2786 - DNA, 84 bp, Artificial Sequence
  Synthetic
tatgaaccactaaggcgtccaccttgttggagccgacgtagacaggggtgtttaagagctaagctgcgtaaagtctgctggtga

SEQ ID NO: 2787 - DNA, 84 bp, Artificial Sequence
  Synthetic
tatgaaccactaaggcgtccaccttgttggcctgccggctggcttgggtgtttaagagctaagctgcgtaaagtctgctggtga

SEQ ID NO: 2788 - DNA, 84 bp, Artificial Sequence
  Synthetic
tatgaaccactaaggcgtccaccttgttggtccacggggcagcatccgggtttaagagctaagctgcgtaaagtctgctggtga

SEQ ID NO: 2789 - DNA, 84 bp, Artificial Sequence
  Synthetic
tatgaaccactaaggcgtccaccttgttggagccttcgtccctcctcgtgtttaagagctaagctgcgtaaagtctgctggtga

SEQ ID NO: 2790 - DNA, 84 bp, Artificial Sequence
  Synthetic
tatgaaccactaaggcgtccaccttgttggcaggagctgcctacgaggagtttaagagctaagctgcgtaaagtctgctggtga

SEQ ID NO: 2791 - DNA, 84 bp, Artificial Sequence
  Synthetic
tatgaaccactaaggcgtccaccttgttggtgcctacgaggagggacgagtttaagagctaagctgcgtaaagtctgctggtga

SEQ ID NO: 2792 - DNA, 84 bp, Artificial Sequence
  Synthetic
tatgaaccactaaggcgtccaccttgttggccaggcttactacgtgaccgtttaagagctaagctgcgtaaagtctgctggtga

SEQ ID NO: 2793 - DNA, 84 bp, Artificial Sequence
  Synthetic
tatgaaccactaaggcgtccaccttgttgggacaccaggcatacgctaggtttaagagctaagctgcgtaaagtctgctggtga

SEQ ID NO: 2794 - DNA, 84 bp, Artificial Sequence
  Synthetic
tatgaaccactaaggcgtccaccttgttggtgtctaccagttcctgagagtttaagagctaagctgcgtaaagtctgctggtga

SEQ ID NO: 2795 - DNA, 84 bp, Artificial Sequence
  Synthetic
tatgaaccactaaggcgtccaccttgttggacatcggtccggctcctcagtttaagagctaagctgcgtaaagtctgctggtga

SEQ ID NO: 2796 - DNA, 84 bp, Artificial Sequence
  Synthetic
tatgaaccactaaggcgtccaccttgttggacgtgcaaccgcgtaaccggtttaagagctaagctgcgtaaagtctgctggtga

SEQ ID NO: 2797 - DNA, 84 bp, Artificial Sequence
  Synthetic
tatgaaccactaaggcgtccaccttgttggtgctagacgagcgcggatagtttaagagctaagctgcgtaaagtctgctggtga

SEQ ID NO: 2798 - DNA, 84 bp, Artificial Sequence
  Synthetic
tatgaaccactaaggcgtccaccttgttggaacaagtaacccaggcgccgtttaagagctaagctgcgtaaagtctgctggtga

SEQ ID NO: 2799 - DNA, 84 bp, Artificial Sequence
  Synthetic
tatgaaccactaaggcgtccaccttgttggaccgcgggcgtaagcccccgtttaagagctaagctgcgtaaagtctgctggtga

SEQ ID NO: 2800 - DNA, 84 bp, Artificial Sequence
  Synthetic
tatgaaccactaaggcgtccaccttgttggaccgctgcacgggttggcggtttaagagctaagctgcgtaaagtctgctggtga

SEQ ID NO: 2801 - DNA, 84 bp, Artificial Sequence
  Synthetic
tatgaaccactaaggcgtccaccttgttggactcatagtcgaacagtgcgtttaagagctaagctgcgtaaagtctgctggtga

SEQ ID NO: 2802 - DNA, 84 bp, Artificial Sequence
  Synthetic
tatgaaccactaaggcgtccaccttgttggagatcaatattatgcaagagtttaagagctaagctgcgtaaagtctgctggtga

SEQ ID NO: 2803 - DNA, 84 bp, Artificial Sequence
  Synthetic
tatgaaccactaaggcgtccaccttgttggagcctcttggttccatggagtttaagagctaagctgcgtaaagtctgctggtga

SEQ ID NO: 2804 - DNA, 84 bp, Artificial Sequence
  Synthetic
tatgaaccactaaggcgtccaccttgttggaggcgcctttaatttgcgtgtttaagagctaagctgcgtaaagtctgctggtga

SEQ ID NO: 2805 - DNA, 84 bp, Artificial Sequence
  Synthetic
tatgaaccactaaggcgtccaccttgttggagggtaacgcagaagaagggtttaagagctaagctgcgtaaagtctgctggtga

SEQ ID NO: 2806 - DNA, 84 bp, Artificial Sequence
  Synthetic
tatgaaccactaaggcgtccaccttgttggaggtgccccgtcgccgggggtttaagagctaagctgcgtaaagtctgctggtga

SEQ ID NO: 2807 - DNA, 84 bp, Artificial Sequence
  Synthetic
tatgaaccactaaggcgtccaccttgttggagtcgcgcaacgcgcggccgtttaagagctaagctgcgtaaagtctgctggtga

SEQ ID NO: 2808 - DNA, 84 bp, Artificial Sequence
  Synthetic
tatgaaccactaaggcgtccaccttgttggcagcccccagagaaagagcgtttaagagctaagctgcgtaaagtctgctggtga

SEQ ID NO: 2809 - DNA, 84 bp, Artificial Sequence
  Synthetic
tatgaaccactaaggcgtccaccttgttggcaggccgccctgctaagaagtttaagagctaagctgcgtaaagtctgctggtga

SEQ ID NO: 2810 - DNA, 84 bp, Artificial Sequence
  Synthetic
tatgaaccactaaggcgtccaccttgttggcagtcctcggcggaggcgtgtttaagagctaagctgcgtaaagtctgctggtga

SEQ ID NO: 2811 - DNA, 84 bp, Artificial Sequence
  Synthetic
tatgaaccactaaggcgtccaccttgttggccaacgctagatataaacagtttaagagctaagctgcgtaaagtctgctggtga

SEQ ID NO: 2812 - DNA, 84 bp, Artificial Sequence
  Synthetic
tatgaaccactaaggcgtccaccttgttggccccgcggaaaggcgtctcgtttaagagctaagctgcgtaaagtctgctggtga

SEQ ID NO: 2813 - DNA, 84 bp, Artificial Sequence
  Synthetic
tatgaaccactaaggcgtccaccttgttggcccctcgattcccgaacaggtttaagagctaagctgcgtaaagtctgctggtga

SEQ ID NO: 2814 - DNA, 84 bp, Artificial Sequence
  Synthetic
tatgaaccactaaggcgtccaccttgttggccgaagctcaagcgtaagagtttaagagctaagctgcgtaaagtctgctggtga

SEQ ID NO: 2815 - DNA, 84 bp, Artificial Sequence
  Synthetic
tatgaaccactaaggcgtccaccttgttggccggcagttgggcagtttggtttaagagctaagctgcgtaaagtctgctggtga

SEQ ID NO: 2816 - DNA, 84 bp, Artificial Sequence
  Synthetic
tatgaaccactaaggcgtccaccttgttggccttacgtgggattcggttgtttaagagctaagctgcgtaaagtctgctggtga

SEQ ID NO: 2817 - DNA, 84 bp, Artificial Sequence
  Synthetic
tatgaaccactaaggcgtccaccttgttggcgacatcggttacatgtgggtttaagagctaagctgcgtaaagtctgctggtga

SEQ ID NO: 2818 - DNA, 84 bp, Artificial Sequence
  Synthetic
tatgaaccactaaggcgtccaccttgttggcgccggaatagcacatcaagtttaagagctaagctgcgtaaagtctgctggtga

SEQ ID NO: 2819 - DNA, 84 bp, Artificial Sequence
  Synthetic
tatgaaccactaaggcgtccaccttgttggcgcgaagacgcgacaccaggtttaagagctaagctgcgtaaagtctgctggtga

SEQ ID NO: 2820 - DNA, 84 bp, Artificial Sequence
  Synthetic
tatgaaccactaaggcgtccaccttgttggcgcgcccattcggactgtcgtttaagagctaagctgcgtaaagtctgctggtga

SEQ ID NO: 2821 - DNA, 84 bp, Artificial Sequence
  Synthetic
tatgaaccactaaggcgtccaccttgttggcggattccccccacggcgagtttaagagctaagctgcgtaaagtctgctggtga

SEQ ID NO: 2822 - DNA, 84 bp, Artificial Sequence
  Synthetic
tatgaaccactaaggcgtccaccttgttggcggggatgtccacactcgggtttaagagctaagctgcgtaaagtctgctggtga

SEQ ID NO: 2823 - DNA, 84 bp, Artificial Sequence
  Synthetic
tatgaaccactaaggcgtccaccttgttggcgtcggggaagccaacctagtttaagagctaagctgcgtaaagtctgctggtga

SEQ ID NO: 2824 - DNA, 84 bp, Artificial Sequence
  Synthetic
tatgaaccactaaggcgtccaccttgttggctgagatgactcaaccacggtttaagagctaagctgcgtaaagtctgctggtga

SEQ ID NO: 2825 - DNA, 84 bp, Artificial Sequence
  Synthetic
tatgaaccactaaggcgtccaccttgttggctgataccgtaaatgacccgtttaagagctaagctgcgtaaagtctgctggtga

SEQ ID NO: 2826 - DNA, 84 bp, Artificial Sequence
  Synthetic
tatgaaccactaaggcgtccaccttgttggctgcactactaaacctccggtttaagagctaagctgcgtaaagtctgctggtga

SEQ ID NO: 2827 - DNA, 84 bp, Artificial Sequence
  Synthetic
tatgaaccactaaggcgtccaccttgttggctttattaccgcaaggagagtttaagagctaagctgcgtaaagtctgctggtga

SEQ ID NO: 2828 - DNA, 84 bp, Artificial Sequence
  Synthetic
tatgaaccactaaggcgtccaccttgttgggaaacgacagggaacccgtgtttaagagctaagctgcgtaaagtctgctggtga

SEQ ID NO: 2829 - DNA, 84 bp, Artificial Sequence
  Synthetic
tatgaaccactaaggcgtccaccttgttgggacggcccagagtacaatagtttaagagctaagctgcgtaaagtctgctggtga

SEQ ID NO: 2830 - DNA, 84 bp, Artificial Sequence
  Synthetic
tatgaaccactaaggcgtccaccttgttgggactactcgtggcgcttgcgtttaagagctaagctgcgtaaagtctgctggtga

SEQ ID NO: 2831 - DNA, 84 bp, Artificial Sequence
  Synthetic
tatgaaccactaaggcgtccaccttgttgggatcgcgccacgaaaataggtttaagagctaagctgcgtaaagtctgctggtga

SEQ ID NO: 2832 - DNA, 84 bp, Artificial Sequence
  Synthetic
tatgaaccactaaggcgtccaccttgttgggcagcgaccggcatgccgcgtttaagagctaagctgcgtaaagtctgctggtga

SEQ ID NO: 2833 - DNA, 84 bp, Artificial Sequence
  Synthetic
tatgaaccactaaggcgtccaccttgttgggccgccaaaccgatcacgtgtttaagagctaagctgcgtaaagtctgctggtga

SEQ ID NO: 2834 - DNA, 84 bp, Artificial Sequence
  Synthetic
tatgaaccactaaggcgtccaccttgttgggcgtcggcgcgacactgccgtttaagagctaagctgcgtaaagtctgctggtga

SEQ ID NO: 2835 - DNA, 84 bp, Artificial Sequence
  Synthetic
tatgaaccactaaggcgtccaccttgttgggctgcgtgcgccgcgcacggtttaagagctaagctgcgtaaagtctgctggtga

SEQ ID NO: 2836 - DNA, 84 bp, Artificial Sequence
  Synthetic
tatgaaccactaaggcgtccaccttgttgggcttgtcgagtccgagcaagtttaagagctaagctgcgtaaagtctgctggtga

SEQ ID NO: 2837 - DNA, 84 bp, Artificial Sequence
  Synthetic
tatgaaccactaaggcgtccaccttgttggggctccagtgtaaaacccggtttaagagctaagctgcgtaaagtctgctggtga

SEQ ID NO: 2838 - DNA, 84 bp, Artificial Sequence
  Synthetic
tatgaaccactaaggcgtccaccttgttggggggatgggagacaattgggtttaagagctaagctgcgtaaagtctgctggtga

SEQ ID NO: 2839 - DNA, 84 bp, Artificial Sequence
  Synthetic
tatgaaccactaaggcgtccaccttgttgggggtcgaatccacacggtagtttaagagctaagctgcgtaaagtctgctggtga

SEQ ID NO: 2840 - DNA, 84 bp, Artificial Sequence
  Synthetic
tatgaaccactaaggcgtccaccttgttggggtagcttcgctccatcaggtttaagagctaagctgcgtaaagtctgctggtga

SEQ ID NO: 2841 - DNA, 84 bp, Artificial Sequence
  Synthetic
tatgaaccactaaggcgtccaccttgttggggtcgcactgggaacaacagtttaagagctaagctgcgtaaagtctgctggtga

SEQ ID NO: 2842 - DNA, 84 bp, Artificial Sequence
  Synthetic
tatgaaccactaaggcgtccaccttgttggggtctcgtaccggctggtcgtttaagagctaagctgcgtaaagtctgctggtga

SEQ ID NO: 2843 - DNA, 84 bp, Artificial Sequence
  Synthetic
tatgaaccactaaggcgtccaccttgttggggtgggtcacgcggaaggggtttaagagctaagctgcgtaaagtctgctggtga

SEQ ID NO: 2844 - DNA, 84 bp, Artificial Sequence
  Synthetic
tatgaaccactaaggcgtccaccttgttgggtccaggcacactaccggcgtttaagagctaagctgcgtaaagtctgctggtga

SEQ ID NO: 2845 - DNA, 84 bp, Artificial Sequence
  Synthetic
tatgaaccactaaggcgtccaccttgttgggtccgaacagcccaggctcgtttaagagctaagctgcgtaaagtctgctggtga

SEQ ID NO: 2846 - DNA, 84 bp, Artificial Sequence
  Synthetic
tatgaaccactaaggcgtccaccttgttgggtccggaaccgcccgaggggtttaagagctaagctgcgtaaagtctgctggtga

SEQ ID NO: 2847 - DNA, 84 bp, Artificial Sequence
  Synthetic
tatgaaccactaaggcgtccaccttgttgggtctttcgaaggcagctttgtttaagagctaagctgcgtaaagtctgctggtga

SEQ ID NO: 2848 - DNA, 84 bp, Artificial Sequence
  Synthetic
tatgaaccactaaggcgtccaccttgttgggttggctgtactgggccaagtttaagagctaagctgcgtaaagtctgctggtga

SEQ ID NO: 2849 - DNA, 84 bp, Artificial Sequence
  Synthetic
tatgaaccactaaggcgtccaccttgttggtaaggacgacccgtcacgggtttaagagctaagctgcgtaaagtctgctggtga

SEQ ID NO: 2850 - DNA, 84 bp, Artificial Sequence
  Synthetic
tatgaaccactaaggcgtccaccttgttggtcaccagcgcataagcgcagtttaagagctaagctgcgtaaagtctgctggtga

SEQ ID NO: 2851 - DNA, 84 bp, Artificial Sequence
  Synthetic
tatgaaccactaaggcgtccaccttgttggtcctgggccgcagatcgctgtttaagagctaagctgcgtaaagtctgctggtga

SEQ ID NO: 2852 - DNA, 84 bp, Artificial Sequence
  Synthetic
tatgaaccactaaggcgtccaccttgttggtctggagagagagacgggcgtttaagagctaagctgcgtaaagtctgctggtga

SEQ ID NO: 2853 - DNA, 84 bp, Artificial Sequence
  Synthetic
tatgaaccactaaggcgtccaccttgttggtggagtccgcctctgtcgggtttaagagctaagctgcgtaaagtctgctggtga

SEQ ID NO: 2854 - DNA, 84 bp, Artificial Sequence
  Synthetic
tatgaaccactaaggcgtccaccttgttggtggccccccgatcgtaggtgtttaagagctaagctgcgtaaagtctgctggtga

SEQ ID NO: 2855 - DNA, 84 bp, Artificial Sequence
  Synthetic
tatgaaccactaaggcgtccaccttgttggtggttgaacaagccaataggtttaagagctaagctgcgtaaagtctgctggtga

SEQ ID NO: 2856 - DNA, 84 bp, Artificial Sequence
  Synthetic
tatgaaccactaaggcgtccaccttgttggttagggcgtaagggttcgagtttaagagctaagctgcgtaaagtctgctggtga

SEQ ID NO: 2857 - DNA, 84 bp, Artificial Sequence
  Synthetic
tatgaaccactaaggcgtccaccttgttggttggttacccctcgattgggtttaagagctaagctgcgtaaagtctgctggtga

SEQ ID NO: 2858 - DNA, 84 bp, Artificial Sequence
  Synthetic
tatgaaccactaaggcgtccaccttgttggagctagcgtgggacagggtgtttaagagctaagctgcgtaaagtctgctggtga

SEQ ID NO: 2859 - DNA, 84 bp, Artificial Sequence
  Synthetic
tatgaaccactaaggcgtccaccttgttggcaacagaaccatctcaagtgtttaagagctaagctgcgtaaagtctgctggtga

SEQ ID NO: 2860 - DNA, 84 bp, Artificial Sequence
  Synthetic
tatgaaccactaaggcgtccaccttgttgggcggtacgcacaggccctagtttaagagctaagctgcgtaaagtctgctggtga

SEQ ID NO: 2861 - DNA, 84 bp, Artificial Sequence
  Synthetic
tatgaaccactaaggcgtccaccttgttggaggccgcagatctaccggagtttaagagctaagctgcgtaaagtctgctggtga

SEQ ID NO: 2862 - DNA, 84 bp, Artificial Sequence
  Synthetic
tatgaaccactaaggcgtccaccttgttgggcacagccgctccagctgggtttaagagctaagctgcgtaaagtctgctggtga

SEQ ID NO: 2863 - DNA, 84 bp, Artificial Sequence
  Synthetic
tatgaaccactaaggcgtccaccttgttggggcgggcggctgcactcacgtttaagagctaagctgcgtaaagtctgctggtga

SEQ ID NO: 2864 - DNA, 84 bp, Artificial Sequence
  Synthetic
tatgaaccactaaggcgtccaccttgttggaccaggccctgcaatcggtgtttaagagctaagctgcgtaaagtctgctggtga

SEQ ID NO: 2865 - DNA, 84 bp, Artificial Sequence
  Synthetic
tatgaaccactaaggcgtccaccttgttggatctctgtggccggcactggtttaagagctaagctgcgtaaagtctgctggtga

SEQ ID NO: 2866 - DNA, 84 bp, Artificial Sequence
  Synthetic
tatgaaccactaaggcgtccaccttgttggtctcaccaggccctgcaatgtttaagagctaagctgcgtaaagtctgctggtga

SEQ ID NO: 2867 - DNA, 84 bp, Artificial Sequence
  Synthetic
tatgaaccactaaggcgtccaccttgttggagaagggctgcgggttagggtttaagagctaagctgcgtaaagtctgctggtga

SEQ ID NO: 2868 - DNA, 84 bp, Artificial Sequence
  Synthetic
tatgaaccactaaggcgtccaccttgttgggagtgcgtctgggagcccggtttaagagctaagctgcgtaaagtctgctggtga

SEQ ID NO: 2869 - DNA, 84 bp, Artificial Sequence
  Synthetic
tatgaaccactaaggcgtccaccttgttggtgcgggagcgagtgcgtctgtttaagagctaagctgcgtaaagtctgctggtga

SEQ ID NO: 2870 - DNA, 84 bp, Artificial Sequence
  Synthetic
tatgaaccactaaggcgtccaccttgttggcccgctcgcgcaaaccgaagtttaagagctaagctgcgtaaagtctgctggtga

SEQ ID NO: 2871 - DNA, 84 bp, Artificial Sequence
  Synthetic
tatgaaccactaaggcgtccaccttgttggccgaaaggcctagagtaaggtttaagagctaagctgcgtaaagtctgctggtga

SEQ ID NO: 2872 - DNA, 84 bp, Artificial Sequence
  Synthetic
tatgaaccactaaggcgtccaccttgttggtgcgtgcggctaagagagtgtttaagagctaagctgcgtaaagtctgctggtga

SEQ ID NO: 2873 - DNA, 84 bp, Artificial Sequence
  Synthetic
tatgaaccactaaggcgtccaccttgttggcaccaccaagccgcagggagtttaagagctaagctgcgtaaagtctgctggtga

SEQ ID NO: 2874 - DNA, 84 bp, Artificial Sequence
  Synthetic
tatgaaccactaaggcgtccaccttgttgggtgagtcggtaccgacggagtttaagagctaagctgcgtaaagtctgctggtga

SEQ ID NO: 2875 - DNA, 84 bp, Artificial Sequence
  Synthetic
tatgaaccactaaggcgtccaccttgttggtcggtaccgacggagggaggtttaagagctaagctgcgtaaagtctgctggtga

SEQ ID NO: 2876 - DNA, 84 bp, Artificial Sequence
  Synthetic
tatgaaccactaaggcgtccaccttgttggcggtcatgccggactcctggtttaagagctaagctgcgtaaagtctgctggtga

SEQ ID NO: 2877 - DNA, 84 bp, Artificial Sequence
  Synthetic
tatgaaccactaaggcgtccaccttgttgggctcctccctacacccccggtttaagagctaagctgcgtaaagtctgctggtga

SEQ ID NO: 2878 - DNA, 84 bp, Artificial Sequence
  Synthetic
tatgaaccactaaggcgtccaccttgttgggggcctctccggagaagaggtttaagagctaagctgcgtaaagtctgctggtga

SEQ ID NO: 2879 - DNA, 84 bp, Artificial Sequence
  Synthetic
tatgaaccactaaggcgtccaccttgttgggaggccacgcccccggaaggtttaagagctaagctgcgtaaagtctgctggtga

SEQ ID NO: 2880 - DNA, 84 bp, Artificial Sequence
  Synthetic
tatgaaccactaaggcgtccaccttgttgggagtcgtggtgaccagggagtttaagagctaagctgcgtaaagtctgctggtga

SEQ ID NO: 2881 - DNA, 84 bp, Artificial Sequence
  Synthetic
tatgaaccactaaggcgtccaccttgttgggccacgcccccggaagcgggtttaagagctaagctgcgtaaagtctgctggtga

SEQ ID NO: 2882 - DNA, 84 bp, Artificial Sequence
  Synthetic
tatgaaccactaaggcgtccaccttgttggggtaggcggggctactacggtttaagagctaagctgcgtaaagtctgctggtga

SEQ ID NO: 2883 - DNA, 84 bp, Artificial Sequence
  Synthetic
tatgaaccactaaggcgtccaccttgttggtacgatgccccatgcgcctgtttaagagctaagctgcgtaaagtctgctggtga

SEQ ID NO: 2884 - DNA, 84 bp, Artificial Sequence
  Synthetic
tatgaaccactaaggcgtccaccttgttggtcagagcgagggcacgggagtttaagagctaagctgcgtaaagtctgctggtga

SEQ ID NO: 2885 - DNA, 84 bp, Artificial Sequence
  Synthetic
tatgaaccactaaggcgtccaccttgttggaggcgccccaggaaggaatgtttaagagctaagctgcgtaaagtctgctggtga

SEQ ID NO: 2886 - DNA, 84 bp, Artificial Sequence
  Synthetic
tatgaaccactaaggcgtccaccttgttggatttaattggccggagtttgtttaagagctaagctgcgtaaagtctgctggtga

SEQ ID NO: 2887 - DNA, 84 bp, Artificial Sequence
  Synthetic
tatgaaccactaaggcgtccaccttgttggctctgaccccgctttcccagtttaagagctaagctgcgtaaagtctgctggtga

SEQ ID NO: 2888 - DNA, 84 bp, Artificial Sequence
  Synthetic
tatgaaccactaaggcgtccaccttgttggaccatgcttgcctgtttatgtttaagagctaagctgcgtaaagtctgctggtga

SEQ ID NO: 2889 - DNA, 84 bp, Artificial Sequence
  Synthetic
tatgaaccactaaggcgtccaccttgttggagacacagggcccataaacgtttaagagctaagctgcgtaaagtctgctggtga

SEQ ID NO: 2890 - DNA, 84 bp, Artificial Sequence
  Synthetic
tatgaaccactaaggcgtccaccttgttggcctagtagaatgtctctaagtttaagagctaagctgcgtaaagtctgctggtga

SEQ ID NO: 2891 - DNA, 84 bp, Artificial Sequence
  Synthetic
tatgaaccactaaggcgtccaccttgttggcgtgcgctcacccagccgcgtttaagagctaagctgcgtaaagtctgctggtga

SEQ ID NO: 2892 - DNA, 84 bp, Artificial Sequence
  Synthetic
tatgaaccactaaggcgtccaccttgttgggcaatctatcagggaacgggtttaagagctaagctgcgtaaagtctgctggtga

SEQ ID NO: 2893 - DNA, 84 bp, Artificial Sequence
  Synthetic
tatgaaccactaaggcgtccaccttgttgggccggtgcggcgtgttcgggtttaagagctaagctgcgtaaagtctgctggtga

SEQ ID NO: 2894 - DNA, 84 bp, Artificial Sequence
  Synthetic
tatgaaccactaaggcgtccaccttgttggcgcggcggcgacggagcacgtttaagagctaagctgcgtaaagtctgctggtga

SEQ ID NO: 2895 - DNA, 84 bp, Artificial Sequence
  Synthetic
tatgaaccactaaggcgtccaccttgttggggcgacggagcaccggcgggtttaagagctaagctgcgtaaagtctgctggtga

SEQ ID NO: 2896 - DNA, 84 bp, Artificial Sequence
  Synthetic
tatgaaccactaaggcgtccaccttgttggggcggcgacggagcaccgggtttaagagctaagctgcgtaaagtctgctggtga

SEQ ID NO: 2897 - DNA, 84 bp, Artificial Sequence
  Synthetic
tatgaaccactaaggcgtccaccttgttggagtcaggcgaccagtcccagtttaagagctaagctgcgtaaagtctgctggtga

SEQ ID NO: 2898 - DNA, 84 bp, Artificial Sequence
  Synthetic
tatgaaccactaaggcgtccaccttgttggcctacccctcaggacacacgtttaagagctaagctgcgtaaagtctgctggtga

SEQ ID NO: 2899 - DNA, 84 bp, Artificial Sequence
  Synthetic
tatgaaccactaaggcgtccaccttgttggggccacatgagcagcgctagtttaagagctaagctgcgtaaagtctgctggtga

SEQ ID NO: 2900 - DNA, 84 bp, Artificial Sequence
  Synthetic
tatgaaccactaaggcgtccaccttgttggaggtttgaactgtattcaggtttaagagctaagctgcgtaaagtctgctggtga

SEQ ID NO: 2901 - DNA, 84 bp, Artificial Sequence
  Synthetic
tatgaaccactaaggcgtccaccttgttggcgcgggagggcatcccgttgtttaagagctaagctgcgtaaagtctgctggtga

SEQ ID NO: 2902 - DNA, 84 bp, Artificial Sequence
  Synthetic
tatgaaccactaaggcgtccaccttgttgggcgagacttacgtgattaggtttaagagctaagctgcgtaaagtctgctggtga

SEQ ID NO: 2903 - DNA, 84 bp, Artificial Sequence
  Synthetic
tatgaaccactaaggcgtccaccttgttggcctgaggagatgttcaggggtttaagagctaagctgcgtaaagtctgctggtga

SEQ ID NO: 2904 - DNA, 84 bp, Artificial Sequence
  Synthetic
tatgaaccactaaggcgtccaccttgttggcgggccgccgcgatcatgtgtttaagagctaagctgcgtaaagtctgctggtga

SEQ ID NO: 2905 - DNA, 84 bp, Artificial Sequence
  Synthetic
tatgaaccactaaggcgtccaccttgttgggcctggtccgacatgatcggtttaagagctaagctgcgtaaagtctgctggtga

SEQ ID NO: 2906 - DNA, 84 bp, Artificial Sequence
  Synthetic
tatgaaccactaaggcgtccaccttgttgggcggcaccgggaggggtaagtttaagagctaagctgcgtaaagtctgctggtga

SEQ ID NO: 2907 - DNA, 84 bp, Artificial Sequence
  Synthetic
tatgaaccactaaggcgtccaccttgttgggcggcgggtgccgaagcgagtttaagagctaagctgcgtaaagtctgctggtga

SEQ ID NO: 2908 - DNA, 84 bp, Artificial Sequence
  Synthetic
tatgaaccactaaggcgtccaccttgttggtttgcggcggcaccgggaggtttaagagctaagctgcgtaaagtctgctggtga

SEQ ID NO: 2909 - DNA, 84 bp, Artificial Sequence
  Synthetic
tatgaaccactaaggcgtccaccttgttgggtcaggcgagtccacgtgagtttaagagctaagctgcgtaaagtctgctggtga

SEQ ID NO: 2910 - DNA, 84 bp, Artificial Sequence
  Synthetic
tatgaaccactaaggcgtccaccttgttggtaagatggcgtctcctcaggtttaagagctaagctgcgtaaagtctgctggtga

SEQ ID NO: 2911 - DNA, 84 bp, Artificial Sequence
  Synthetic
tatgaaccactaaggcgtccaccttgttggtcgcaatctggcccccctggtttaagagctaagctgcgtaaagtctgctggtga

SEQ ID NO: 2912 - DNA, 84 bp, Artificial Sequence
  Synthetic
tatgaaccactaaggcgtccaccttgttgggagaaacctacggtaagaagtttaagagctaagctgcgtaaagtctgctggtga

SEQ ID NO: 2913 - DNA, 84 bp, Artificial Sequence
  Synthetic
tatgaaccactaaggcgtccaccttgttgggccgcccgggcgagcgacagtttaagagctaagctgcgtaaagtctgctggtga

SEQ ID NO: 2914 - DNA, 84 bp, Artificial Sequence
  Synthetic
tatgaaccactaaggcgtccaccttgttgggcgggaggggagaaacctagtttaagagctaagctgcgtaaagtctgctggtga

SEQ ID NO: 2915 - DNA, 84 bp, Artificial Sequence
  Synthetic
tatgaaccactaaggcgtccaccttgttggccgcgaagctgggggcctcgtttaagagctaagctgcgtaaagtctgctggtga

SEQ ID NO: 2916 - DNA, 84 bp, Artificial Sequence
  Synthetic
tatgaaccactaaggcgtccaccttgttggctcctggtcgccggccagagtttaagagctaagctgcgtaaagtctgctggtga

SEQ ID NO: 2917 - DNA, 84 bp, Artificial Sequence
  Synthetic
tatgaaccactaaggcgtccaccttgttggtcgagctggggtcactcgggtttaagagctaagctgcgtaaagtctgctggtga

SEQ ID NO: 2918 - DNA, 84 bp, Artificial Sequence
  Synthetic
tatgaaccactaaggcgtccaccttgttggcctctgggtcccccccaaggtttaagagctaagctgcgtaaagtctgctggtga

SEQ ID NO: 2919 - DNA, 84 bp, Artificial Sequence
  Synthetic
tatgaaccactaaggcgtccaccttgttggctgggtcccccccaagagggtttaagagctaagctgcgtaaagtctgctggtga

SEQ ID NO: 2920 - DNA, 84 bp, Artificial Sequence
  Synthetic
tatgaaccactaaggcgtccaccttgttgggaggagaaaaaagcccgtcgtttaagagctaagctgcgtaaagtctgctggtga

SEQ ID NO: 2921 - DNA, 84 bp, Artificial Sequence
  Synthetic
tatgaaccactaaggcgtccaccttgttggactcggctcaggcccgacagtttaagagctaagctgcgtaaagtctgctggtga

SEQ ID NO: 2922 - DNA, 84 bp, Artificial Sequence
  Synthetic
tatgaaccactaaggcgtccaccttgttggggtccggtgccgcctccaagtttaagagctaagctgcgtaaagtctgctggtga

SEQ ID NO: 2923 - DNA, 84 bp, Artificial Sequence
  Synthetic
tatgaaccactaaggcgtccaccttgttgggtggagttgcccttggagggtttaagagctaagctgcgtaaagtctgctggtga

SEQ ID NO: 2924 - DNA, 84 bp, Artificial Sequence
  Synthetic
tatgaaccactaaggcgtccaccttgttggagtgtgggtccagagatcagtttaagagctaagctgcgtaaagtctgctggtga

SEQ ID NO: 2925 - DNA, 84 bp, Artificial Sequence
  Synthetic
tatgaaccactaaggcgtccaccttgttggcagataaggtgcaaatcaagtttaagagctaagctgcgtaaagtctgctggtga

SEQ ID NO: 2926 - DNA, 84 bp, Artificial Sequence
  Synthetic
tatgaaccactaaggcgtccaccttgttggcatggtcgggagagacaccgtttaagagctaagctgcgtaaagtctgctggtga

SEQ ID NO: 2927 - DNA, 84 bp, Artificial Sequence
  Synthetic
tatgaaccactaaggcgtccaccttgttggtcgggagagacaccaggcggtttaagagctaagctgcgtaaagtctgctggtga

SEQ ID NO: 2928 - DNA, 84 bp, Artificial Sequence
  Synthetic
tatgaaccactaaggcgtccaccttgttggtctctcccgaccatggagggtttaagagctaagctgcgtaaagtctgctggtga

SEQ ID NO: 2929 - DNA, 84 bp, Artificial Sequence
  Synthetic
tatgaaccactaaggcgtccaccttgttggcaggagcctcagagcgagcgtttaagagctaagctgcgtaaagtctgctggtga

SEQ ID NO: 2930 - DNA, 84 bp, Artificial Sequence
  Synthetic
tatgaaccactaaggcgtccaccttgttgggcgtggtgacgtcgcaacggtttaagagctaagctgcgtaaagtctgctggtga

SEQ ID NO: 2931 - DNA, 84 bp, Artificial Sequence
  Synthetic
tatgaaccactaaggcgtccaccttgttgggggcgaacgtcgcgacgacgtttaagagctaagctgcgtaaagtctgctggtga

SEQ ID NO: 2932 - DNA, 84 bp, Artificial Sequence
  Synthetic
tatgaaccactaaggcgtccaccttgttggaggcgattggatgcggcgggtttaagagctaagctgcgtaaagtctgctggtga

SEQ ID NO: 2933 - DNA, 84 bp, Artificial Sequence
  Synthetic
tatgaaccactaaggcgtccaccttgttgggagtagcgagtcggcaaccgtttaagagctaagctgcgtaaagtctgctggtga

SEQ ID NO: 2934 - DNA, 84 bp, Artificial Sequence
  Synthetic
tatgaaccactaaggcgtccaccttgttggtagcgagtcggcaacccgggtttaagagctaagctgcgtaaagtctgctggtga

SEQ ID NO: 2935 - DNA, 84 bp, Artificial Sequence
  Synthetic
tatgaaccactaaggcgtccaccttgttggagcggtgagtgctcggggagtttaagagctaagctgcgtaaagtctgctggtga

SEQ ID NO: 2936 - DNA, 84 bp, Artificial Sequence
  Synthetic
tatgaaccactaaggcgtccaccttgttggcaggtctagagggacgggggtttaagagctaagctgcgtaaagtctgctggtga

SEQ ID NO: 2937 - DNA, 84 bp, Artificial Sequence
  Synthetic
tatgaaccactaaggcgtccaccttgttggcgccgagcggtgagtgctcgtttaagagctaagctgcgtaaagtctgctggtga

SEQ ID NO: 2938 - DNA, 84 bp, Artificial Sequence
  Synthetic
tatgaaccactaaggcgtccaccttgttgggacactcctgcgaccaggtgtttaagagctaagctgcgtaaagtctgctggtga

SEQ ID NO: 2939 - DNA, 84 bp, Artificial Sequence
  Synthetic
tatgaaccactaaggcgtccaccttgttgggcccggtggagcttccactgtttaagagctaagctgcgtaaagtctgctggtga

SEQ ID NO: 2940 - DNA, 84 bp, Artificial Sequence
  Synthetic
tatgaaccactaaggcgtccaccttgttggggccgcagagatgcctaccgtttaagagctaagctgcgtaaagtctgctggtga

SEQ ID NO: 2941 - DNA, 84 bp, Artificial Sequence
  Synthetic
tatgaaccactaaggcgtccaccttgttggccaaccggcgagcagaactgtttaagagctaagctgcgtaaagtctgctggtga

SEQ ID NO: 2942 - DNA, 84 bp, Artificial Sequence
  Synthetic
tatgaaccactaaggcgtccaccttgttggctgcggggaggtgcttccggtttaagagctaagctgcgtaaagtctgctggtga

SEQ ID NO: 2943 - DNA, 84 bp, Artificial Sequence
  Synthetic
tatgaaccactaaggcgtccaccttgttgggggaacgcacctctcggaggtttaagagctaagctgcgtaaagtctgctggtga

SEQ ID NO: 2944 - DNA, 84 bp, Artificial Sequence
  Synthetic
tatgaaccactaaggcgtccaccttgttggagccgccgcggagacaatggtttaagagctaagctgcgtaaagtctgctggtga

SEQ ID NO: 2945 - DNA, 84 bp, Artificial Sequence
  Synthetic
tatgaaccactaaggcgtccaccttgttggcaatgcggcgagtctgggagtttaagagctaagctgcgtaaagtctgctggtga

SEQ ID NO: 2946 - DNA, 84 bp, Artificial Sequence
  Synthetic
tatgaaccactaaggcgtccaccttgttggtcgagggctgcagccgccggtttaagagctaagctgcgtaaagtctgctggtga

SEQ ID NO: 2947 - DNA, 84 bp, Artificial Sequence
  Synthetic
tatgaaccactaaggcgtccaccttgttggagcggagtgagtgactagagtttaagagctaagctgcgtaaagtctgctggtga

SEQ ID NO: 2948 - DNA, 84 bp, Artificial Sequence
  Synthetic
tatgaaccactaaggcgtccaccttgttggctgatgtcgtaactagggggtttaagagctaagctgcgtaaagtctgctggtga

SEQ ID NO: 2949 - DNA, 84 bp, Artificial Sequence
  Synthetic
tatgaaccactaaggcgtccaccttgttgggcgcagcccatgttagtgagtttaagagctaagctgcgtaaagtctgctggtga

SEQ ID NO: 2950 - DNA, 84 bp, Artificial Sequence
  Synthetic
tatgaaccactaaggcgtccaccttgttggaatggaggaggcccagcgggtttaagagctaagctgcgtaaagtctgctggtga

SEQ ID NO: 2951 - DNA, 84 bp, Artificial Sequence
  Synthetic
tatgaaccactaaggcgtccaccttgttggagtacaacgccgggccgtggtttaagagctaagctgcgtaaagtctgctggtga

SEQ ID NO: 2952 - DNA, 84 bp, Artificial Sequence
  Synthetic
tatgaaccactaaggcgtccaccttgttgggcgccgcgcctgagaccgggtttaagagctaagctgcgtaaagtctgctggtga

SEQ ID NO: 2953 - DNA, 84 bp, Artificial Sequence
  Synthetic
tatgaaccactaaggcgtccaccttgttggatagggagtccggaggtaggtttaagagctaagctgcgtaaagtctgctggtga

SEQ ID NO: 2954 - DNA, 84 bp, Artificial Sequence
  Synthetic
tatgaaccactaaggcgtccaccttgttgggcggacagtgcggaactaagtttaagagctaagctgcgtaaagtctgctggtga

SEQ ID NO: 2955 - DNA, 84 bp, Artificial Sequence
  Synthetic
tatgaaccactaaggcgtccaccttgttgggctgacagacgcaagatgggtttaagagctaagctgcgtaaagtctgctggtga

SEQ ID NO: 2956 - DNA, 84 bp, Artificial Sequence
  Synthetic
tatgaaccactaaggcgtccaccttgttggcgccaccgctcactcacttgtttaagagctaagctgcgtaaagtctgctggtga

SEQ ID NO: 2957 - DNA, 84 bp, Artificial Sequence
  Synthetic
tatgaaccactaaggcgtccaccttgttgggggacgctggtgaccaagagtttaagagctaagctgcgtaaagtctgctggtga

SEQ ID NO: 2958 - DNA, 84 bp, Artificial Sequence
  Synthetic
tatgaaccactaaggcgtccaccttgttggtcaccagcgtcccccgcgcgtttaagagctaagctgcgtaaagtctgctggtga

SEQ ID NO: 2959 - DNA, 84 bp, Artificial Sequence
  Synthetic
tatgaaccactaaggcgtccaccttgttggagtgtctgcccgaacccaggtttaagagctaagctgcgtaaagtctgctggtga

SEQ ID NO: 2960 - DNA, 84 bp, Artificial Sequence
  Synthetic
tatgaaccactaaggcgtccaccttgttggctctttgctccccacctctgtttaagagctaagctgcgtaaagtctgctggtga

SEQ ID NO: 2961 - DNA, 84 bp, Artificial Sequence
  Synthetic
tatgaaccactaaggcgtccaccttgttgggtctgcccgaacccagagggtttaagagctaagctgcgtaaagtctgctggtga

SEQ ID NO: 2962 - DNA, 84 bp, Artificial Sequence
  Synthetic
tatgaaccactaaggcgtccaccttgttggcagtgaggacgggaaagaagtttaagagctaagctgcgtaaagtctgctggtga

SEQ ID NO: 2963 - DNA, 84 bp, Artificial Sequence
  Synthetic
tatgaaccactaaggcgtccaccttgttgggcgcaatgtgcgcaggaaggtttaagagctaagctgcgtaaagtctgctggtga

SEQ ID NO: 2964 - DNA, 84 bp, Artificial Sequence
  Synthetic
tatgaaccactaaggcgtccaccttgttggggccgagcctagcacagtggtttaagagctaagctgcgtaaagtctgctggtga

SEQ ID NO: 2965 - DNA, 84 bp, Artificial Sequence
  Synthetic
tatgaaccactaaggcgtccaccttgttgggaggtctgcagcgcagcttgtttaagagctaagctgcgtaaagtctgctggtga

SEQ ID NO: 2966 - DNA, 84 bp, Artificial Sequence
  Synthetic
tatgaaccactaaggcgtccaccttgttgggagtgctgcagtgactgcagtttaagagctaagctgcgtaaagtctgctggtga

SEQ ID NO: 2967 - DNA, 84 bp, Artificial Sequence
  Synthetic
tatgaaccactaaggcgtccaccttgttggggaggctctgctcggatcggtttaagagctaagctgcgtaaagtctgctggtga

SEQ ID NO: 2968 - DNA, 84 bp, Artificial Sequence
  Synthetic
tatgaaccactaaggcgtccaccttgttggcggaccaggacgagtagaggtttaagagctaagctgcgtaaagtctgctggtga

SEQ ID NO: 2969 - DNA, 84 bp, Artificial Sequence
  Synthetic
tatgaaccactaaggcgtccaccttgttggtccgggcgcgaacgctatagtttaagagctaagctgcgtaaagtctgctggtga

SEQ ID NO: 2970 - DNA, 84 bp, Artificial Sequence
  Synthetic
tatgaaccactaaggcgtccaccttgttggtgcgcatcgggtgagacgcgtttaagagctaagctgcgtaaagtctgctggtga

SEQ ID NO: 2971 - DNA, 84 bp, Artificial Sequence
  Synthetic
tatgaaccactaaggcgtccaccttgttggccaatgggagttcaggagggtttaagagctaagctgcgtaaagtctgctggtga

SEQ ID NO: 2972 - DNA, 84 bp, Artificial Sequence
  Synthetic
tatgaaccactaaggcgtccaccttgttgggcctcaaggcgcacccaaggtttaagagctaagctgcgtaaagtctgctggtga

SEQ ID NO: 2973 - DNA, 84 bp, Artificial Sequence
  Synthetic
tatgaaccactaaggcgtccaccttgttggggatcgggtgttgcatccagtttaagagctaagctgcgtaaagtctgctggtga

SEQ ID NO: 2974 - DNA, 84 bp, Artificial Sequence
  Synthetic
tatgaaccactaaggcgtccaccttgttggccaggccggcacccaggatgtttaagagctaagctgcgtaaagtctgctggtga

SEQ ID NO: 2975 - DNA, 84 bp, Artificial Sequence
  Synthetic
tatgaaccactaaggcgtccaccttgttgggttgcaggcggggcacctcgtttaagagctaagctgcgtaaagtctgctggtga

SEQ ID NO: 2976 - DNA, 84 bp, Artificial Sequence
  Synthetic
tatgaaccactaaggcgtccaccttgttggtcacggccacttccgaccagtttaagagctaagctgcgtaaagtctgctggtga

SEQ ID NO: 2977 - DNA, 84 bp, Artificial Sequence
  Synthetic
tatgaaccactaaggcgtccaccttgttggccttggtcgtccccggcgggtttaagagctaagctgcgtaaagtctgctggtga

SEQ ID NO: 2978 - DNA, 84 bp, Artificial Sequence
  Synthetic
tatgaaccactaaggcgtccaccttgttggcgactgtggagactctcaggtttaagagctaagctgcgtaaagtctgctggtga

SEQ ID NO: 2979 - DNA, 84 bp, Artificial Sequence
  Synthetic
tatgaaccactaaggcgtccaccttgttggcgcagaccttggtcgtcccgtttaagagctaagctgcgtaaagtctgctggtga

SEQ ID NO: 2980 - DNA, 84 bp, Artificial Sequence
  Synthetic
tatgaaccactaaggcgtccaccttgttggagggagcagaaatctcgaggtttaagagctaagctgcgtaaagtctgctggtga

SEQ ID NO: 2981 - DNA, 84 bp, Artificial Sequence
  Synthetic
tatgaaccactaaggcgtccaccttgttgggaagcaggacgttctcaccgtttaagagctaagctgcgtaaagtctgctggtga

SEQ ID NO: 2982 - DNA, 84 bp, Artificial Sequence
  Synthetic
tatgaaccactaaggcgtccaccttgttgggtggggttccggaatgagcgtttaagagctaagctgcgtaaagtctgctggtga

SEQ ID NO: 2983 - DNA, 84 bp, Artificial Sequence
  Synthetic
tatgaaccactaaggcgtccaccttgttggccctctcccagcttgaagggtttaagagctaagctgcgtaaagtctgctggtga

SEQ ID NO: 2984 - DNA, 84 bp, Artificial Sequence
  Synthetic
tatgaaccactaaggcgtccaccttgttgggcgccccgccccccatcgggtttaagagctaagctgcgtaaagtctgctggtga

SEQ ID NO: 2985 - DNA, 84 bp, Artificial Sequence
  Synthetic
tatgaaccactaaggcgtccaccttgttggggtaccaggacttggagacgtttaagagctaagctgcgtaaagtctgctggtga

SEQ ID NO: 2986 - DNA, 84 bp, Artificial Sequence
  Synthetic
tatgaaccactaaggcgtccaccttgttggcgggaaacgctgtttgaaggtttaagagctaagctgcgtaaagtctgctggtga

SEQ ID NO: 2987 - DNA, 84 bp, Artificial Sequence
  Synthetic
tatgaaccactaaggcgtccaccttgttggttgaagcgggtgagtagaggtttaagagctaagctgcgtaaagtctgctggtga

SEQ ID NO: 2988 - DNA, 84 bp, Artificial Sequence
  Synthetic
tatgaaccactaaggcgtccaccttgttggttgcgcgcgcgggagtcaggtttaagagctaagctgcgtaaagtctgctggtga

SEQ ID NO: 2989 - DNA, 84 bp, Artificial Sequence
  Synthetic
tatgaaccactaaggcgtccaccttgttggcagccaggccgcgctactcgtttaagagctaagctgcgtaaagtctgctggtga

SEQ ID NO: 2990 - DNA, 84 bp, Artificial Sequence
  Synthetic
tatgaaccactaaggcgtccaccttgttgggcgcggtgagtggggtccagtttaagagctaagctgcgtaaagtctgctggtga

SEQ ID NO: 2991 - DNA, 84 bp, Artificial Sequence
  Synthetic
tatgaaccactaaggcgtccaccttgttgggctcgaacgtgcttgatgggtttaagagctaagctgcgtaaagtctgctggtga

SEQ ID NO: 2992 - DNA, 84 bp, Artificial Sequence
  Synthetic
tatgaaccactaaggcgtccaccttgttggaagctggtccgccatggtggtttaagagctaagctgcgtaaagtctgctggtga

SEQ ID NO: 2993 - DNA, 84 bp, Artificial Sequence
  Synthetic
tatgaaccactaaggcgtccaccttgttggcaacggaggcgacgcactagtttaagagctaagctgcgtaaagtctgctggtga

SEQ ID NO: 2994 - DNA, 84 bp, Artificial Sequence
  Synthetic
tatgaaccactaaggcgtccaccttgttgggagcaaagacgtttcccgcgtttaagagctaagctgcgtaaagtctgctggtga

SEQ ID NO: 2995 - DNA, 84 bp, Artificial Sequence
  Synthetic
tatgaaccactaaggcgtccaccttgttggagaggagagaccggccagtgtttaagagctaagctgcgtaaagtctgctggtga

SEQ ID NO: 2996 - DNA, 84 bp, Artificial Sequence
  Synthetic
tatgaaccactaaggcgtccaccttgttggcacccgagctaggtctctggtttaagagctaagctgcgtaaagtctgctggtga

SEQ ID NO: 2997 - DNA, 84 bp, Artificial Sequence
  Synthetic
tatgaaccactaaggcgtccaccttgttggctagaggaggcccctagaggtttaagagctaagctgcgtaaagtctgctggtga

SEQ ID NO: 2998 - DNA, 84 bp, Artificial Sequence
  Synthetic
tatgaaccactaaggcgtccaccttgttggaagatggcggacatctcccgtttaagagctaagctgcgtaaagtctgctggtga

SEQ ID NO: 2999 - DNA, 84 bp, Artificial Sequence
  Synthetic
tatgaaccactaaggcgtccaccttgttggctcatcaggaagcgcgggggtttaagagctaagctgcgtaaagtctgctggtga

SEQ ID NO: 3000 - DNA, 84 bp, Artificial Sequence
  Synthetic
tatgaaccactaaggcgtccaccttgttggctccctggacgaactcatcgtttaagagctaagctgcgtaaagtctgctggtga

SEQ ID NO: 3001 - DNA, 84 bp, Artificial Sequence
  Synthetic
tatgaaccactaaggcgtccaccttgttggccccgagcccctccgtcgggtttaagagctaagctgcgtaaagtctgctggtga

SEQ ID NO: 3002 - DNA, 84 bp, Artificial Sequence
  Synthetic
tatgaaccactaaggcgtccaccttgttggctcagagacatggagccgtgtttaagagctaagctgcgtaaagtctgctggtga

SEQ ID NO: 3003 - DNA, 84 bp, Artificial Sequence
  Synthetic
tatgaaccactaaggcgtccaccttgttggggctctcgcgagtctgggtgtttaagagctaagctgcgtaaagtctgctggtga

SEQ ID NO: 3004 - DNA, 84 bp, Artificial Sequence
  Synthetic
tatgaaccactaaggcgtccaccttgttggcgcaaatatggcgccggaggtttaagagctaagctgcgtaaagtctgctggtga

SEQ ID NO: 3005 - DNA, 84 bp, Artificial Sequence
  Synthetic
tatgaaccactaaggcgtccaccttgttggggcagcttgaagggcgagagtttaagagctaagctgcgtaaagtctgctggtga

SEQ ID NO: 3006 - DNA, 84 bp, Artificial Sequence
  Synthetic
tatgaaccactaaggcgtccaccttgttggtgggctcgggcagcttgaagtttaagagctaagctgcgtaaagtctgctggtga

SEQ ID NO: 3007 - DNA, 84 bp, Artificial Sequence
  Synthetic
tatgaaccactaaggcgtccaccttgttggccctgaagcggaggcgaaggtttaagagctaagctgcgtaaagtctgctggtga

SEQ ID NO: 3008 - DNA, 84 bp, Artificial Sequence
  Synthetic
tatgaaccactaaggcgtccaccttgttggcgtagcgacgcgggaagtcgtttaagagctaagctgcgtaaagtctgctggtga

SEQ ID NO: 3009 - DNA, 84 bp, Artificial Sequence
  Synthetic
tatgaaccactaaggcgtccaccttgttggggcggacgaacgggcaggagtttaagagctaagctgcgtaaagtctgctggtga

SEQ ID NO: 3010 - DNA, 84 bp, Artificial Sequence
  Synthetic
tatgaaccactaaggcgtccaccttgttggcgcgcgcctacacagggtggtttaagagctaagctgcgtaaagtctgctggtga

SEQ ID NO: 3011 - DNA, 84 bp, Artificial Sequence
  Synthetic
tatgaaccactaaggcgtccaccttgttgggcagcgcactgccgcgtaggtttaagagctaagctgcgtaaagtctgctggtga

SEQ ID NO: 3012 - DNA, 84 bp, Artificial Sequence
  Synthetic
tatgaaccactaaggcgtccaccttgttggggaagcgggacgccccgaggtttaagagctaagctgcgtaaagtctgctggtga

SEQ ID NO: 3013 - DNA, 84 bp, Artificial Sequence
  Synthetic
tatgaaccactaaggcgtccaccttgttggcctcgctccctgactggaggtttaagagctaagctgcgtaaagtctgctggtga

SEQ ID NO: 3014 - DNA, 84 bp, Artificial Sequence
  Synthetic
tatgaaccactaaggcgtccaccttgttgggggtgcagacgggaagttggtttaagagctaagctgcgtaaagtctgctggtga

SEQ ID NO: 3015 - DNA, 84 bp, Artificial Sequence
  Synthetic
tatgaaccactaaggcgtccaccttgttgggtagcgtgtggcctccaccgtttaagagctaagctgcgtaaagtctgctggtga

SEQ ID NO: 3016 - DNA, 84 bp, Artificial Sequence
  Synthetic
tatgaaccactaaggcgtccaccttgttggattctgttaacggtagtgggtttaagagctaagctgcgtaaagtctgctggtga

SEQ ID NO: 3017 - DNA, 84 bp, Artificial Sequence
  Synthetic
tatgaaccactaaggcgtccaccttgttggcctctccggattctgttaagtttaagagctaagctgcgtaaagtctgctggtga

SEQ ID NO: 3018 - DNA, 84 bp, Artificial Sequence
  Synthetic
tatgaaccactaaggcgtccaccttgttggcggattctgttaacggtaggtttaagagctaagctgcgtaaagtctgctggtga

SEQ ID NO: 3019 - DNA, 84 bp, Artificial Sequence
  Synthetic
tatgaaccactaaggcgtccaccttgttggagcagggatcagacgagaggtttaagagctaagctgcgtaaagtctgctggtga

SEQ ID NO: 3020 - DNA, 84 bp, Artificial Sequence
  Synthetic
tatgaaccactaaggcgtccaccttgttggcaatgcagccgccagactggtttaagagctaagctgcgtaaagtctgctggtga

SEQ ID NO: 3021 - DNA, 84 bp, Artificial Sequence
  Synthetic
tatgaaccactaaggcgtccaccttgttgggtctggcggctgcattgctgtttaagagctaagctgcgtaaagtctgctggtga

SEQ ID NO: 3022 - DNA, 84 bp, Artificial Sequence
  Synthetic
tatgaaccactaaggcgtccaccttgttggaagctgggggtggagccgggtttaagagctaagctgcgtaaagtctgctggtga

SEQ ID NO: 3023 - DNA, 84 bp, Artificial Sequence
  Synthetic
tatgaaccactaaggcgtccaccttgttggacgcggcgggtacctctaggtttaagagctaagctgcgtaaagtctgctggtga

SEQ ID NO: 3024 - DNA, 84 bp, Artificial Sequence
  Synthetic
tatgaaccactaaggcgtccaccttgttggatggaactggcggacgtgggtttaagagctaagctgcgtaaagtctgctggtga

SEQ ID NO: 3025 - DNA, 84 bp, Artificial Sequence
  Synthetic
tatgaaccactaaggcgtccaccttgttggagtcgcgatcctgaggtaagtttaagagctaagctgcgtaaagtctgctggtga

SEQ ID NO: 3026 - DNA, 84 bp, Artificial Sequence
  Synthetic
tatgaaccactaaggcgtccaccttgttggcgactgacaaggccccaaggtttaagagctaagctgcgtaaagtctgctggtga

SEQ ID NO: 3027 - DNA, 84 bp, Artificial Sequence
  Synthetic
tatgaaccactaaggcgtccaccttgttggggacaagcgatccccgcgcgtttaagagctaagctgcgtaaagtctgctggtga

SEQ ID NO: 3028 - DNA, 84 bp, Artificial Sequence
  Synthetic
tatgaaccactaaggcgtccaccttgttggaagctagtcacccgggggtgtttaagagctaagctgcgtaaagtctgctggtga

SEQ ID NO: 3029 - DNA, 84 bp, Artificial Sequence
  Synthetic
tatgaaccactaaggcgtccaccttgttggagactcttggggccggggtgtttaagagctaagctgcgtaaagtctgctggtga

SEQ ID NO: 3030 - DNA, 84 bp, Artificial Sequence
  Synthetic
tatgaaccactaaggcgtccaccttgttggggccaagctagtcacccgggtttaagagctaagctgcgtaaagtctgctggtga

SEQ ID NO: 3031 - DNA, 84 bp, Artificial Sequence
  Synthetic
tatgaaccactaaggcgtccaccttgttggagggaaactccgagcgagagtttaagagctaagctgcgtaaagtctgctggtga

SEQ ID NO: 3032 - DNA, 84 bp, Artificial Sequence
  Synthetic
tatgaaccactaaggcgtccaccttgttggcagcgcggagcgaacgcaggtttaagagctaagctgcgtaaagtctgctggtga

SEQ ID NO: 3033 - DNA, 84 bp, Artificial Sequence
  Synthetic
tatgaaccactaaggcgtccaccttgttggcccaatgctccccaaacgggtttaagagctaagctgcgtaaagtctgctggtga

SEQ ID NO: 3034 - DNA, 84 bp, Artificial Sequence
  Synthetic
tatgaaccactaaggcgtccaccttgttggcaaggagggtcaggaggcggtttaagagctaagctgcgtaaagtctgctggtga

SEQ ID NO: 3035 - DNA, 84 bp, Artificial Sequence
  Synthetic
tatgaaccactaaggcgtccaccttgttgggcaggcggcacatcactctgtttaagagctaagctgcgtaaagtctgctggtga

SEQ ID NO: 3036 - DNA, 84 bp, Artificial Sequence
  Synthetic
tatgaaccactaaggcgtccaccttgttggtggccagcggtggctcttggtttaagagctaagctgcgtaaagtctgctggtga

SEQ ID NO: 3037 - DNA, 84 bp, Artificial Sequence
  Synthetic
tatgaaccactaaggcgtccaccttgttggcgcgcctcgcactgcctcagtttaagagctaagctgcgtaaagtctgctggtga

SEQ ID NO: 3038 - DNA, 84 bp, Artificial Sequence
  Synthetic
tatgaaccactaaggcgtccaccttgttggggcccgcgtcagtcacctcgtttaagagctaagctgcgtaaagtctgctggtga

SEQ ID NO: 3039 - DNA, 84 bp, Artificial Sequence
  Synthetic
tatgaaccactaaggcgtccaccttgttggggctcctgcgagaagcaaggtttaagagctaagctgcgtaaagtctgctggtga

SEQ ID NO: 3040 - DNA, 84 bp, Artificial Sequence
  Synthetic
tatgaaccactaaggcgtccaccttgttggcagggttctcccgagaggggtttaagagctaagctgcgtaaagtctgctggtga

SEQ ID NO: 3041 - DNA, 84 bp, Artificial Sequence
  Synthetic
tatgaaccactaaggcgtccaccttgttggggccagggttctcccgagagtttaagagctaagctgcgtaaagtctgctggtga

SEQ ID NO: 3042 - DNA, 84 bp, Artificial Sequence
  Synthetic
tatgaaccactaaggcgtccaccttgttgggtcccagcgtcctccctctgtttaagagctaagctgcgtaaagtctgctggtga

SEQ ID NO: 3043 - DNA, 84 bp, Artificial Sequence
  Synthetic
tatgaaccactaaggcgtccaccttgttgggcaagcgcggaaggctggggtttaagagctaagctgcgtaaagtctgctggtga

SEQ ID NO: 3044 - DNA, 84 bp, Artificial Sequence
  Synthetic
tatgaaccactaaggcgtccaccttgttgggttcttccaatagcggcccgtttaagagctaagctgcgtaaagtctgctggtga

SEQ ID NO: 3045 - DNA, 84 bp, Artificial Sequence
  Synthetic
tatgaaccactaaggcgtccaccttgttggttcacggttcttccaataggtttaagagctaagctgcgtaaagtctgctggtga

SEQ ID NO: 3046 - DNA, 84 bp, Artificial Sequence
  Synthetic
tatgaaccactaaggcgtccaccttgttggaacatggccgccgcctgaggtttaagagctaagctgcgtaaagtctgctggtga

SEQ ID NO: 3047 - DNA, 84 bp, Artificial Sequence
  Synthetic
tatgaaccactaaggcgtccaccttgttggcgccgcctgagaggagagcgtttaagagctaagctgcgtaaagtctgctggtga

SEQ ID NO: 3048 - DNA, 84 bp, Artificial Sequence
  Synthetic
tatgaaccactaaggcgtccaccttgttggtacccgcgggctgcagagagtttaagagctaagctgcgtaaagtctgctggtga

SEQ ID NO: 3049 - DNA, 84 bp, Artificial Sequence
  Synthetic
tatgaaccactaaggcgtccaccttgttggcgcgcgtccaccggctcccgtttaagagctaagctgcgtaaagtctgctggtga

SEQ ID NO: 3050 - DNA, 84 bp, Artificial Sequence
  Synthetic
tatgaaccactaaggcgtccaccttgttgggccgccgcccggagaacaggtttaagagctaagctgcgtaaagtctgctggtga

SEQ ID NO: 3051 - DNA, 84 bp, Artificial Sequence
  Synthetic
tatgaaccactaaggcgtccaccttgttgggcgccgctccatgtagcccgtttaagagctaagctgcgtaaagtctgctggtga

SEQ ID NO: 3052 - DNA, 84 bp, Artificial Sequence
  Synthetic
tatgaaccactaaggcgtccaccttgttggagcagggagcaacgcacacgtttaagagctaagctgcgtaaagtctgctggtga

SEQ ID NO: 3053 - DNA, 84 bp, Artificial Sequence
  Synthetic
tatgaaccactaaggcgtccaccttgttgggcgggactcggcggcatgggtttaagagctaagctgcgtaaagtctgctggtga

SEQ ID NO: 3054 - DNA, 84 bp, Artificial Sequence
  Synthetic
tatgaaccactaaggcgtccaccttgttggggccagggcagcaccgcaggtttaagagctaagctgcgtaaagtctgctggtga

SEQ ID NO: 3055 - DNA, 84 bp, Artificial Sequence
  Synthetic
tatgaaccactaaggcgtccaccttgttggctagcgtagcgcttcacgtgtttaagagctaagctgcgtaaagtctgctggtga

SEQ ID NO: 3056 - DNA, 84 bp, Artificial Sequence
  Synthetic
tatgaaccactaaggcgtccaccttgttgggcgcctcggagcacggtgagtttaagagctaagctgcgtaaagtctgctggtga

SEQ ID NO: 3057 - DNA, 84 bp, Artificial Sequence
  Synthetic
tatgaaccactaaggcgtccaccttgttggtgctgccgggactgctccggtttaagagctaagctgcgtaaagtctgctggtga

SEQ ID NO: 3058 - DNA, 84 bp, Artificial Sequence
  Synthetic
tatgaaccactaaggcgtccaccttgttggggcactaggcggagagagggtttaagagctaagctgcgtaaagtctgctggtga

SEQ ID NO: 3059 - DNA, 84 bp, Artificial Sequence
  Synthetic
tatgaaccactaaggcgtccaccttgttggggtaagccgcgaggaggaagtttaagagctaagctgcgtaaagtctgctggtga

SEQ ID NO: 3060 - DNA, 84 bp, Artificial Sequence
  Synthetic
tatgaaccactaaggcgtccaccttgttggtagcaggatcggtccacaggtttaagagctaagctgcgtaaagtctgctggtga

SEQ ID NO: 3061 - DNA, 84 bp, Artificial Sequence
  Synthetic
tatgaaccactaaggcgtccaccttgttggcagaggcgtctcaacggctgtttaagagctaagctgcgtaaagtctgctggtga

SEQ ID NO: 3062 - DNA, 84 bp, Artificial Sequence
  Synthetic
tatgaaccactaaggcgtccaccttgttggcgcgggagcagcgcagctagtttaagagctaagctgcgtaaagtctgctggtga

SEQ ID NO: 3063 - DNA, 84 bp, Artificial Sequence
  Synthetic
tatgaaccactaaggcgtccaccttgttggtgccgcagaggcgtctcaagtttaagagctaagctgcgtaaagtctgctggtga

SEQ ID NO: 3064 - DNA, 84 bp, Artificial Sequence
  Synthetic
tatgaaccactaaggcgtccaccttgttggacctcgccccttgcaacaagtttaagagctaagctgcgtaaagtctgctggtga

SEQ ID NO: 3065 - DNA, 84 bp, Artificial Sequence
  Synthetic
tatgaaccactaaggcgtccaccttgttgggagtcatccgtccagaagggtttaagagctaagctgcgtaaagtctgctggtga

SEQ ID NO: 3066 - DNA, 84 bp, Artificial Sequence
  Synthetic
tatgaaccactaaggcgtccaccttgttggggttgctaccgctgagtccgtttaagagctaagctgcgtaaagtctgctggtga

SEQ ID NO: 3067 - DNA, 84 bp, Artificial Sequence
  Synthetic
tatgaaccactaaggcgtccaccttgttggggagggccggtctgaagaggtttaagagctaagctgcgtaaagtctgctggtga

SEQ ID NO: 3068 - DNA, 84 bp, Artificial Sequence
  Synthetic
tatgaaccactaaggcgtccaccttgttggaggcggctccgaggaaccggtttaagagctaagctgcgtaaagtctgctggtga

SEQ ID NO: 3069 - DNA, 84 bp, Artificial Sequence
  Synthetic
tatgaaccactaaggcgtccaccttgttgggccgcctcgctcctcttcagtttaagagctaagctgcgtaaagtctgctggtga

SEQ ID NO: 3070 - DNA, 84 bp, Artificial Sequence
  Synthetic
tatgaaccactaaggcgtccaccttgttggcgaagagcggaggcgaccagtttaagagctaagctgcgtaaagtctgctggtga

SEQ ID NO: 3071 - DNA, 84 bp, Artificial Sequence
  Synthetic
tatgaaccactaaggcgtccaccttgttgggggactaccctaggtgaaagtttaagagctaagctgcgtaaagtctgctggtga

SEQ ID NO: 3072 - DNA, 84 bp, Artificial Sequence
  Synthetic
tatgaaccactaaggcgtccaccttgttgggggaggccgtacctccgaggtttaagagctaagctgcgtaaagtctgctggtga

SEQ ID NO: 3073 - DNA, 84 bp, Artificial Sequence
  Synthetic
tatgaaccactaaggcgtccaccttgttggagcgccggaggctagtggggtttaagagctaagctgcgtaaagtctgctggtga

SEQ ID NO: 3074 - DNA, 84 bp, Artificial Sequence
  Synthetic
tatgaaccactaaggcgtccaccttgttggtcgctcccgaggatgctgggtttaagagctaagctgcgtaaagtctgctggtga

SEQ ID NO: 3075 - DNA, 84 bp, Artificial Sequence
  Synthetic
tatgaaccactaaggcgtccaccttgttggtggagcgccggaggctagtgtttaagagctaagctgcgtaaagtctgctggtga

SEQ ID NO: 3076 - DNA, 84 bp, Artificial Sequence
  Synthetic
tatgaaccactaaggcgtccaccttgttggaaggaggcgccggctgtgggtttaagagctaagctgcgtaaagtctgctggtga

SEQ ID NO: 3077 - DNA, 84 bp, Artificial Sequence
  Synthetic
tatgaaccactaaggcgtccaccttgttggcaggagtccggctccccgagtttaagagctaagctgcgtaaagtctgctggtga

SEQ ID NO: 3078 - DNA, 84 bp, Artificial Sequence
  Synthetic
tatgaaccactaaggcgtccaccttgttggcgatttgaaccgaggatttgtttaagagctaagctgcgtaaagtctgctggtga

SEQ ID NO: 3079 - DNA, 84 bp, Artificial Sequence
  Synthetic
tatgaaccactaaggcgtccaccttgttggcgcctgggcgctaagatgggtttaagagctaagctgcgtaaagtctgctggtga

SEQ ID NO: 3080 - DNA, 84 bp, Artificial Sequence
  Synthetic
tatgaaccactaaggcgtccaccttgttggtgcctgccccggaagtggtgtttaagagctaagctgcgtaaagtctgctggtga

SEQ ID NO: 3081 - DNA, 84 bp, Artificial Sequence
  Synthetic
tatgaaccactaaggcgtccaccttgttggtggcggggcccgagcgacggtttaagagctaagctgcgtaaagtctgctggtga

SEQ ID NO: 3082 - DNA, 84 bp, Artificial Sequence
  Synthetic
tatgaaccactaaggcgtccaccttgttggccgctagctcaccacaggagtttaagagctaagctgcgtaaagtctgctggtga

SEQ ID NO: 3083 - DNA, 84 bp, Artificial Sequence
  Synthetic
tatgaaccactaaggcgtccaccttgttgggaatccgctagctcaccacgtttaagagctaagctgcgtaaagtctgctggtga

SEQ ID NO: 3084 - DNA, 84 bp, Artificial Sequence
  Synthetic
tatgaaccactaaggcgtccaccttgttgggtctgcagaaggcgcgagggtttaagagctaagctgcgtaaagtctgctggtga

SEQ ID NO: 3085 - DNA, 84 bp, Artificial Sequence
  Synthetic
tatgaaccactaaggcgtccaccttgttggcggggtcgcattgtggctagtttaagagctaagctgcgtaaagtctgctggtga

SEQ ID NO: 3086 - DNA, 84 bp, Artificial Sequence
  Synthetic
tatgaaccactaaggcgtccaccttgttggcggttgcggggtcgcattggtttaagagctaagctgcgtaaagtctgctggtga

SEQ ID NO: 3087 - DNA, 84 bp, Artificial Sequence
  Synthetic
tatgaaccactaaggcgtccaccttgttgggccgccctgcggatcacgtgtttaagagctaagctgcgtaaagtctgctggtga

SEQ ID NO: 3088 - DNA, 84 bp, Artificial Sequence
  Synthetic
tatgaaccactaaggcgtccaccttgttggaagcgccgcactctccttagtttaagagctaagctgcgtaaagtctgctggtga

SEQ ID NO: 3089 - DNA, 84 bp, Artificial Sequence
  Synthetic
tatgaaccactaaggcgtccaccttgttggccgagccctaaggagagtggtttaagagctaagctgcgtaaagtctgctggtga

SEQ ID NO: 3090 - DNA, 84 bp, Artificial Sequence
  Synthetic
tatgaaccactaaggcgtccaccttgttggggccagagaccgagccctagtttaagagctaagctgcgtaaagtctgctggtga

SEQ ID NO: 3091 - DNA, 84 bp, Artificial Sequence
  Synthetic
tatgaaccactaaggcgtccaccttgttggcacctcacaggccgcaccagtttaagagctaagctgcgtaaagtctgctggtga

SEQ ID NO: 3092 - DNA, 84 bp, Artificial Sequence
  Synthetic
tatgaaccactaaggcgtccaccttgttgggatacttctgagcaacggggtttaagagctaagctgcgtaaagtctgctggtga

SEQ ID NO: 3093 - DNA, 84 bp, Artificial Sequence
  Synthetic
tatgaaccactaaggcgtccaccttgttggggcggagggctccgaagtcgtttaagagctaagctgcgtaaagtctgctggtga

SEQ ID NO: 3094 - DNA, 84 bp, Artificial Sequence
  Synthetic
tatgaaccactaaggcgtccaccttgttgggaaccccacttccccacaagtttaagagctaagctgcgtaaagtctgctggtga

SEQ ID NO: 3095 - DNA, 84 bp, Artificial Sequence
  Synthetic
tatgaaccactaaggcgtccaccttgttggggtggggaaacttgaaagtgtttaagagctaagctgcgtaaagtctgctggtga

SEQ ID NO: 3096 - DNA, 84 bp, Artificial Sequence
  Synthetic
tatgaaccactaaggcgtccaccttgttggtcgtgggtttcgatattgggtttaagagctaagctgcgtaaagtctgctggtga

SEQ ID NO: 3097 - DNA, 84 bp, Artificial Sequence
  Synthetic
tatgaaccactaaggcgtccaccttgttggactgctgaggaactcctaggtttaagagctaagctgcgtaaagtctgctggtga

SEQ ID NO: 3098 - DNA, 84 bp, Artificial Sequence
  Synthetic
tatgaaccactaaggcgtccaccttgttggcaggctcacctgctaacccgtttaagagctaagctgcgtaaagtctgctggtga

SEQ ID NO: 3099 - DNA, 84 bp, Artificial Sequence
  Synthetic
tatgaaccactaaggcgtccaccttgttggggcgagagaacgaagactggtttaagagctaagctgcgtaaagtctgctggtga

SEQ ID NO: 3100 - DNA, 84 bp, Artificial Sequence
  Synthetic
tatgaaccactaaggcgtccaccttgttggctgggcgcgggaatcccgggtttaagagctaagctgcgtaaagtctgctggtga

SEQ ID NO: 3101 - DNA, 84 bp, Artificial Sequence
  Synthetic
tatgaaccactaaggcgtccaccttgttgggaggaggaggcggcaccaagtttaagagctaagctgcgtaaagtctgctggtga

SEQ ID NO: 3102 - DNA, 84 bp, Artificial Sequence
  Synthetic
tatgaaccactaaggcgtccaccttgttggggaggcggcaccaagggtagtttaagagctaagctgcgtaaagtctgctggtga

SEQ ID NO: 3103 - DNA, 84 bp, Artificial Sequence
  Synthetic
tatgaaccactaaggcgtccaccttgttggcacacagggagctcgatctgtttaagagctaagctgcgtaaagtctgctggtga

SEQ ID NO: 3104 - DNA, 84 bp, Artificial Sequence
  Synthetic
tatgaaccactaaggcgtccaccttgttgggcagcgcgcggtgcacacagtttaagagctaagctgcgtaaagtctgctggtga

SEQ ID NO: 3105 - DNA, 84 bp, Artificial Sequence
  Synthetic
tatgaaccactaaggcgtccaccttgttgggcccgaggcgcgtaagtgggtttaagagctaagctgcgtaaagtctgctggtga

SEQ ID NO: 3106 - DNA, 84 bp, Artificial Sequence
  Synthetic
tatgaaccactaaggcgtccaccttgttggcacgctcccgggaggctgagtttaagagctaagctgcgtaaagtctgctggtga

SEQ ID NO: 3107 - DNA, 84 bp, Artificial Sequence
  Synthetic
tatgaaccactaaggcgtccaccttgttgggccgcgtcacgctcccggggtttaagagctaagctgcgtaaagtctgctggtga

SEQ ID NO: 3108 - DNA, 84 bp, Artificial Sequence
  Synthetic
tatgaaccactaaggcgtccaccttgttgggcctcccgggagcgtgacggtttaagagctaagctgcgtaaagtctgctggtga

SEQ ID NO: 3109 - DNA, 84 bp, Artificial Sequence
  Synthetic
tatgaaccactaaggcgtccaccttgttggccggcggcgaggggatagcgtttaagagctaagctgcgtaaagtctgctggtga

SEQ ID NO: 3110 - DNA, 84 bp, Artificial Sequence
  Synthetic
tatgaaccactaaggcgtccaccttgttgggatccttgagcttctccgggtttaagagctaagctgcgtaaagtctgctggtga

SEQ ID NO: 3111 - DNA, 84 bp, Artificial Sequence
  Synthetic
tatgaaccactaaggcgtccaccttgttgggggatagctggttaccagagtttaagagctaagctgcgtaaagtctgctggtga

SEQ ID NO: 3112 - DNA, 84 bp, Artificial Sequence
  Synthetic
tatgaaccactaaggcgtccaccttgttgggcgcgctttgggaacaggagtttaagagctaagctgcgtaaagtctgctggtga

SEQ ID NO: 3113 - DNA, 84 bp, Artificial Sequence
  Synthetic
tatgaaccactaaggcgtccaccttgttgggcgggaggttcgattgaccgtttaagagctaagctgcgtaaagtctgctggtga

SEQ ID NO: 3114 - DNA, 84 bp, Artificial Sequence
  Synthetic
tatgaaccactaaggcgtccaccttgttggtaacgcgcgctttgggaacgtttaagagctaagctgcgtaaagtctgctggtga

SEQ ID NO: 3115 - DNA, 84 bp, Artificial Sequence
  Synthetic
tatgaaccactaaggcgtccaccttgttggaacaggaggagtaagattggtttaagagctaagctgcgtaaagtctgctggtga

SEQ ID NO: 3116 - DNA, 84 bp, Artificial Sequence
  Synthetic
tatgaaccactaaggcgtccaccttgttggcttactcctcctgttccaagtttaagagctaagctgcgtaaagtctgctggtga

SEQ ID NO: 3117 - DNA, 84 bp, Artificial Sequence
  Synthetic
tatgaaccactaaggcgtccaccttgttgggagtgctgtcccttggaacgtttaagagctaagctgcgtaaagtctgctggtga

SEQ ID NO: 3118 - DNA, 84 bp, Artificial Sequence
  Synthetic
tatgaaccactaaggcgtccaccttgttggacggccttgccgagcactggtttaagagctaagctgcgtaaagtctgctggtga

SEQ ID NO: 3119 - DNA, 84 bp, Artificial Sequence
  Synthetic
tatgaaccactaaggcgtccaccttgttggagaagagcggaagggggttgtttaagagctaagctgcgtaaagtctgctggtga

SEQ ID NO: 3120 - DNA, 84 bp, Artificial Sequence
  Synthetic
tatgaaccactaaggcgtccaccttgttgggaagggaccccggacccgggtttaagagctaagctgcgtaaagtctgctggtga

SEQ ID NO: 3121 - DNA, 84 bp, Artificial Sequence
  Synthetic
tatgaaccactaaggcgtccaccttgttggccgccatggccgacaaggagtttaagagctaagctgcgtaaagtctgctggtga

SEQ ID NO: 3122 - DNA, 84 bp, Artificial Sequence
  Synthetic
tatgaaccactaaggcgtccaccttgttggggggcgcaggaaacaataggtttaagagctaagctgcgtaaagtctgctggtga

SEQ ID NO: 3123 - DNA, 84 bp, Artificial Sequence
  Synthetic
tatgaaccactaaggcgtccaccttgttgggtgcagtccccggtactgagtttaagagctaagctgcgtaaagtctgctggtga

SEQ ID NO: 3124 - DNA, 84 bp, Artificial Sequence
  Synthetic
tatgaaccactaaggcgtccaccttgttggagtgtgacgcgcttgggaagtttaagagctaagctgcgtaaagtctgctggtga

SEQ ID NO: 3125 - DNA, 84 bp, Artificial Sequence
  Synthetic
tatgaaccactaaggcgtccaccttgttggtaacgagaggagtccgagggtttaagagctaagctgcgtaaagtctgctggtga

SEQ ID NO: 3126 - DNA, 84 bp, Artificial Sequence
  Synthetic
tatgaaccactaaggcgtccaccttgttggtcgcgggtaccgaggtctggtttaagagctaagctgcgtaaagtctgctggtga

SEQ ID NO: 3127 - DNA, 84 bp, Artificial Sequence
  Synthetic
tatgaaccactaaggcgtccaccttgttggaatcccgaggcaatctcgggtttaagagctaagctgcgtaaagtctgctggtga

SEQ ID NO: 3128 - DNA, 84 bp, Artificial Sequence
  Synthetic
tatgaaccactaaggcgtccaccttgttggccagacccgcacgcggaacgtttaagagctaagctgcgtaaagtctgctggtga

SEQ ID NO: 3129 - DNA, 84 bp, Artificial Sequence
  Synthetic
tatgaaccactaaggcgtccaccttgttggcccgaggcaatctcggagggtttaagagctaagctgcgtaaagtctgctggtga

SEQ ID NO: 3130 - DNA, 84 bp, Artificial Sequence
  Synthetic
tatgaaccactaaggcgtccaccttgttgggcgcaacgagggcgaacaagtttaagagctaagctgcgtaaagtctgctggtga

SEQ ID NO: 3131 - DNA, 84 bp, Artificial Sequence
  Synthetic
tatgaaccactaaggcgtccaccttgttggtagcactactgcgcaacgagtttaagagctaagctgcgtaaagtctgctggtga

SEQ ID NO: 3132 - DNA, 84 bp, Artificial Sequence
  Synthetic
tatgaaccactaaggcgtccaccttgttggtatatctccctggagatgggtttaagagctaagctgcgtaaagtctgctggtga

SEQ ID NO: 3133 - DNA, 84 bp, Artificial Sequence
  Synthetic
tatgaaccactaaggcgtccaccttgttggagggttagccgcgcaggtggtttaagagctaagctgcgtaaagtctgctggtga

SEQ ID NO: 3134 - DNA, 84 bp, Artificial Sequence
  Synthetic
tatgaaccactaaggcgtccaccttgttgggaactcccagtcagcgggtgtttaagagctaagctgcgtaaagtctgctggtga

SEQ ID NO: 3135 - DNA, 84 bp, Artificial Sequence
  Synthetic
tatgaaccactaaggcgtccaccttgttggttgcgcaggcgcaatgctggtttaagagctaagctgcgtaaagtctgctggtga

SEQ ID NO: 3136 - DNA, 84 bp, Artificial Sequence
  Synthetic
tatgaaccactaaggcgtccaccttgttgggatctagtcctgcagtagggtttaagagctaagctgcgtaaagtctgctggtga

SEQ ID NO: 3137 - DNA, 84 bp, Artificial Sequence
  Synthetic
tatgaaccactaaggcgtccaccttgttgggcggcccggggccacaccggtttaagagctaagctgcgtaaagtctgctggtga

SEQ ID NO: 3138 - DNA, 84 bp, Artificial Sequence
  Synthetic
tatgaaccactaaggcgtccaccttgttggggccttgcactggcttggggtttaagagctaagctgcgtaaagtctgctggtga

SEQ ID NO: 3139 - DNA, 84 bp, Artificial Sequence
  Synthetic
tatgaaccactaaggcgtccaccttgttggagatcggagagtcggacacgtttaagagctaagctgcgtaaagtctgctggtga

SEQ ID NO: 3140 - DNA, 84 bp, Artificial Sequence
  Synthetic
tatgaaccactaaggcgtccaccttgttgggaagcccggtctaactctcgtttaagagctaagctgcgtaaagtctgctggtga

SEQ ID NO: 3141 - DNA, 84 bp, Artificial Sequence
  Synthetic
tatgaaccactaaggcgtccaccttgttgggtgtcggagatccgagagtgtttaagagctaagctgcgtaaagtctgctggtga

SEQ ID NO: 3142 - DNA, 84 bp, Artificial Sequence
  Synthetic
tatgaaccactaaggcgtccaccttgttggacgtcccgcagccgctccagtttaagagctaagctgcgtaaagtctgctggtga

SEQ ID NO: 3143 - DNA, 84 bp, Artificial Sequence
  Synthetic
tatgaaccactaaggcgtccaccttgttggcggcgccggaggagacccggtttaagagctaagctgcgtaaagtctgctggtga

SEQ ID NO: 3144 - DNA, 84 bp, Artificial Sequence
  Synthetic
tatgaaccactaaggcgtccaccttgttgggggcgagaagacaccgggtgtttaagagctaagctgcgtaaagtctgctggtga

SEQ ID NO: 3145 - DNA, 84 bp, Artificial Sequence
  Synthetic
tatgaaccactaaggcgtccaccttgttggctttggcttctctgagttggtttaagagctaagctgcgtaaagtctgctggtga

SEQ ID NO: 3146 - DNA, 84 bp, Artificial Sequence
  Synthetic
tatgaaccactaaggcgtccaccttgttgggagttggggttgtgtataggtttaagagctaagctgcgtaaagtctgctggtga

SEQ ID NO: 3147 - DNA, 84 bp, Artificial Sequence
  Synthetic
tatgaaccactaaggcgtccaccttgttgggcgctgggaattcagctttgtttaagagctaagctgcgtaaagtctgctggtga

SEQ ID NO: 3148 - DNA, 84 bp, Artificial Sequence
  Synthetic
tatgaaccactaaggcgtccaccttgttggccctcgccagggaccaggggtttaagagctaagctgcgtaaagtctgctggtga

SEQ ID NO: 3149 - DNA, 84 bp, Artificial Sequence
  Synthetic
tatgaaccactaaggcgtccaccttgttgggaggggcggagagccaccggtttaagagctaagctgcgtaaagtctgctggtga

SEQ ID NO: 3150 - DNA, 84 bp, Artificial Sequence
  Synthetic
tatgaaccactaaggcgtccaccttgttggttggttgccgcgagcgtgggtttaagagctaagctgcgtaaagtctgctggtga

SEQ ID NO: 3151 - DNA, 84 bp, Artificial Sequence
  Synthetic
tatgaaccactaaggcgtccaccttgttggccaccgccgggaatcacacgtttaagagctaagctgcgtaaagtctgctggtga

SEQ ID NO: 3152 - DNA, 84 bp, Artificial Sequence
  Synthetic
tatgaaccactaaggcgtccaccttgttgggaagccctcgagctttcgtgtttaagagctaagctgcgtaaagtctgctggtga

SEQ ID NO: 3153 - DNA, 84 bp, Artificial Sequence
  Synthetic
tatgaaccactaaggcgtccaccttgttgggagcccgtgtgattcccgggtttaagagctaagctgcgtaaagtctgctggtga

SEQ ID NO: 3154 - DNA, 84 bp, Artificial Sequence
  Synthetic
tatgaaccactaaggcgtccaccttgttggacttcgcgggagaagttgtgtttaagagctaagctgcgtaaagtctgctggtga

SEQ ID NO: 3155 - DNA, 84 bp, Artificial Sequence
  Synthetic
tatgaaccactaaggcgtccaccttgttgggaatctgttatcgaggctcgtttaagagctaagctgcgtaaagtctgctggtga

SEQ ID NO: 3156 - DNA, 84 bp, Artificial Sequence
  Synthetic
tatgaaccactaaggcgtccaccttgttggtgcaagaaggcgaagacaggtttaagagctaagctgcgtaaagtctgctggtga

SEQ ID NO: 3157 - DNA, 84 bp, Artificial Sequence
  Synthetic
tatgaaccactaaggcgtccaccttgttggagaggaggcgcgagaatgggtttaagagctaagctgcgtaaagtctgctggtga

SEQ ID NO: 3158 - DNA, 84 bp, Artificial Sequence
  Synthetic
tatgaaccactaaggcgtccaccttgttggggaagaggaggcgcgagaagtttaagagctaagctgcgtaaagtctgctggtga

SEQ ID NO: 3159 - DNA, 84 bp, Artificial Sequence
  Synthetic
tatgaaccactaaggcgtccaccttgttggggaggcgcgagaatggagggtttaagagctaagctgcgtaaagtctgctggtga

SEQ ID NO: 3160 - DNA, 84 bp, Artificial Sequence
  Synthetic
tatgaaccactaaggcgtccaccttgttggccgatacttgtccacccaggtttaagagctaagctgcgtaaagtctgctggtga

SEQ ID NO: 3161 - DNA, 84 bp, Artificial Sequence
  Synthetic
tatgaaccactaaggcgtccaccttgttggggacggctggactatcacagtttaagagctaagctgcgtaaagtctgctggtga

SEQ ID NO: 3162 - DNA, 84 bp, Artificial Sequence
  Synthetic
tatgaaccactaaggcgtccaccttgttggttgtccacccagaggctcagtttaagagctaagctgcgtaaagtctgctggtga

SEQ ID NO: 3163 - DNA, 84 bp, Artificial Sequence
  Synthetic
tatgaaccactaaggcgtccaccttgttggacctcacaaggggcatcaagtttaagagctaagctgcgtaaagtctgctggtga

SEQ ID NO: 3164 - DNA, 84 bp, Artificial Sequence
  Synthetic
tatgaaccactaaggcgtccaccttgttggcgggaactgaggcgactgtgtttaagagctaagctgcgtaaagtctgctggtga

SEQ ID NO: 3165 - DNA, 84 bp, Artificial Sequence
  Synthetic
tatgaaccactaaggcgtccaccttgttggcgttccgtggcgggaactggtttaagagctaagctgcgtaaagtctgctggtga

SEQ ID NO: 3166 - DNA, 84 bp, Artificial Sequence
  Synthetic
tatgaaccactaaggcgtccaccttgttgggggtctcagggtcaggtcggtttaagagctaagctgcgtaaagtctgctggtga

SEQ ID NO: 3167 - DNA, 84 bp, Artificial Sequence
  Synthetic
tatgaaccactaaggcgtccaccttgttggggtcactgtgcaggcgcttgtttaagagctaagctgcgtaaagtctgctggtga

SEQ ID NO: 3168 - DNA, 84 bp, Artificial Sequence
  Synthetic
tatgaaccactaaggcgtccaccttgttggggtgacgcgacgatctcaggtttaagagctaagctgcgtaaagtctgctggtga

SEQ ID NO: 3169 - DNA, 84 bp, Artificial Sequence
  Synthetic
tatgaaccactaaggcgtccaccttgttggcagttggcgtaggtgcattgtttaagagctaagctgcgtaaagtctgctggtga

SEQ ID NO: 3170 - DNA, 84 bp, Artificial Sequence
  Synthetic
tatgaaccactaaggcgtccaccttgttggcgtaggtgcattcggagtggtttaagagctaagctgcgtaaagtctgctggtga

SEQ ID NO: 3171 - DNA, 84 bp, Artificial Sequence
  Synthetic
tatgaaccactaaggcgtccaccttgttgggcttgagcggctccggaaggtttaagagctaagctgcgtaaagtctgctggtga

SEQ ID NO: 3172 - DNA, 84 bp, Artificial Sequence
  Synthetic
tatgaaccactaaggcgtccaccttgttggaccgcaggccggcttgtgggtttaagagctaagctgcgtaaagtctgctggtga

SEQ ID NO: 3173 - DNA, 84 bp, Artificial Sequence
  Synthetic
tatgaaccactaaggcgtccaccttgttggcaggagctgcggccccgtcgtttaagagctaagctgcgtaaagtctgctggtga

SEQ ID NO: 3174 - DNA, 84 bp, Artificial Sequence
  Synthetic
tatgaaccactaaggcgtccaccttgttggcgtccggcccgggctggtagtttaagagctaagctgcgtaaagtctgctggtga

SEQ ID NO: 3175 - DNA, 84 bp, Artificial Sequence
  Synthetic
tatgaaccactaaggcgtccaccttgttggaagctgcccgggaaagtgggtttaagagctaagctgcgtaaagtctgctggtga

SEQ ID NO: 3176 - DNA, 84 bp, Artificial Sequence
  Synthetic
tatgaaccactaaggcgtccaccttgttgggagggaggagatcggcggagtttaagagctaagctgcgtaaagtctgctggtga

SEQ ID NO: 3177 - DNA, 84 bp, Artificial Sequence
  Synthetic
tatgaaccactaaggcgtccaccttgttgggcgagatgcctcgttccccgtttaagagctaagctgcgtaaagtctgctggtga

SEQ ID NO: 3178 - DNA, 84 bp, Artificial Sequence
  Synthetic
tatgaaccactaaggcgtccaccttgttgggagaaggcgaagaaggctggtttaagagctaagctgcgtaaagtctgctggtga

SEQ ID NO: 3179 - DNA, 84 bp, Artificial Sequence
  Synthetic
tatgaaccactaaggcgtccaccttgttgggccgaggagaaggcgaagagtttaagagctaagctgcgtaaagtctgctggtga

SEQ ID NO: 3180 - DNA, 84 bp, Artificial Sequence
  Synthetic
tatgaaccactaaggcgtccaccttgttgggctgtctgagcagcggttggtttaagagctaagctgcgtaaagtctgctggtga

SEQ ID NO: 3181 - DNA, 84 bp, Artificial Sequence
  Synthetic
tatgaaccactaaggcgtccaccttgttgggaagtgcggtgttgagcgcgtttaagagctaagctgcgtaaagtctgctggtga

SEQ ID NO: 3182 - DNA, 84 bp, Artificial Sequence
  Synthetic
tatgaaccactaaggcgtccaccttgttgggcggccaaggcgactctgtgtttaagagctaagctgcgtaaagtctgctggtga

SEQ ID NO: 3183 - DNA, 84 bp, Artificial Sequence
  Synthetic
tatgaaccactaaggcgtccaccttgttggggagagaaggggcccaacagtttaagagctaagctgcgtaaagtctgctggtga

SEQ ID NO: 3184 - DNA, 84 bp, Artificial Sequence
  Synthetic
tatgaaccactaaggcgtccaccttgttggagctggagagagacaatacgtttaagagctaagctgcgtaaagtctgctggtga

SEQ ID NO: 3185 - DNA, 84 bp, Artificial Sequence
  Synthetic
tatgaaccactaaggcgtccaccttgttggaggcgaactcaggcgacaggtttaagagctaagctgcgtaaagtctgctggtga

SEQ ID NO: 3186 - DNA, 84 bp, Artificial Sequence
  Synthetic
tatgaaccactaaggcgtccaccttgttggctcccctccctggccctaggtttaagagctaagctgcgtaaagtctgctggtga

SEQ ID NO: 3187 - DNA, 84 bp, Artificial Sequence
  Synthetic
tatgaaccactaaggcgtccaccttgttggctggctgcgtaggagggacgtttaagagctaagctgcgtaaagtctgctggtga

SEQ ID NO: 3188 - DNA, 84 bp, Artificial Sequence
  Synthetic
tatgaaccactaaggcgtccaccttgttgggcgcccgaaaggtgaacacgtttaagagctaagctgcgtaaagtctgctggtga

SEQ ID NO: 3189 - DNA, 84 bp, Artificial Sequence
  Synthetic
tatgaaccactaaggcgtccaccttgttggtgcgctgccgcaacgaatagtttaagagctaagctgcgtaaagtctgctggtga

SEQ ID NO: 3190 - DNA, 84 bp, Artificial Sequence
  Synthetic
tatgaaccactaaggcgtccaccttgttggccggcgccgccgcacaatagtttaagagctaagctgcgtaaagtctgctggtga

SEQ ID NO: 3191 - DNA, 84 bp, Artificial Sequence
  Synthetic
tatgaaccactaaggcgtccaccttgttggcgcggccggagcaagactcgtttaagagctaagctgcgtaaagtctgctggtga

SEQ ID NO: 3192 - DNA, 84 bp, Artificial Sequence
  Synthetic
tatgaaccactaaggcgtccaccttgttggtgaggctcgccatattgtggtttaagagctaagctgcgtaaagtctgctggtga

SEQ ID NO: 3193 - DNA, 84 bp, Artificial Sequence
  Synthetic
tatgaaccactaaggcgtccaccttgttggggcctggcacagtcctgttgtttaagagctaagctgcgtaaagtctgctggtga

SEQ ID NO: 3194 - DNA, 84 bp, Artificial Sequence
  Synthetic
tatgaaccactaaggcgtccaccttgttggtgcgagttctgttcccgcggtttaagagctaagctgcgtaaagtctgctggtga

SEQ ID NO: 3195 - DNA, 84 bp, Artificial Sequence
  Synthetic
tatgaaccactaaggcgtccaccttgttggtgtctccgccgcgggtcaggtttaagagctaagctgcgtaaagtctgctggtga

SEQ ID NO: 3196 - DNA, 84 bp, Artificial Sequence
  Synthetic
tatgaaccactaaggcgtccaccttgttggggcggcggcatctttctcggtttaagagctaagctgcgtaaagtctgctggtga

SEQ ID NO: 3197 - DNA, 84 bp, Artificial Sequence
  Synthetic
tatgaaccactaaggcgtccaccttgttggttagggggaagacccgggcgtttaagagctaagctgcgtaaagtctgctggtga

SEQ ID NO: 3198 - DNA, 84 bp, Artificial Sequence
  Synthetic
tatgaaccactaaggcgtccaccttgttggtttctcgaggagctctcctgtttaagagctaagctgcgtaaagtctgctggtga

SEQ ID NO: 3199 - DNA, 84 bp, Artificial Sequence
  Synthetic
tatgaaccactaaggcgtccaccttgttggccggtgaaatccaagatgggtttaagagctaagctgcgtaaagtctgctggtga

SEQ ID NO: 3200 - DNA, 84 bp, Artificial Sequence
  Synthetic
tatgaaccactaaggcgtccaccttgttggcgtccggtgaaatccaagagtttaagagctaagctgcgtaaagtctgctggtga

SEQ ID NO: 3201 - DNA, 84 bp, Artificial Sequence
  Synthetic
tatgaaccactaaggcgtccaccttgttgggctaggctgaccctcctgcgtttaagagctaagctgcgtaaagtctgctggtga

SEQ ID NO: 3202 - DNA, 84 bp, Artificial Sequence
  Synthetic
tatgaaccactaaggcgtccaccttgttggccgcgccggtggccggagcgtttaagagctaagctgcgtaaagtctgctggtga

SEQ ID NO: 3203 - DNA, 84 bp, Artificial Sequence
  Synthetic
tatgaaccactaaggcgtccaccttgttggccggagctggtgcctgcgggtttaagagctaagctgcgtaaagtctgctggtga

SEQ ID NO: 3204 - DNA, 84 bp, Artificial Sequence
  Synthetic
tatgaaccactaaggcgtccaccttgttgggcagccagaacctaggtcagtttaagagctaagctgcgtaaagtctgctggtga

SEQ ID NO: 3205 - DNA, 84 bp, Artificial Sequence
  Synthetic
tatgaaccactaaggcgtccaccttgttgggcgacgggggatgaacgcggtttaagagctaagctgcgtaaagtctgctggtga

SEQ ID NO: 3206 - DNA, 84 bp, Artificial Sequence
  Synthetic
tatgaaccactaaggcgtccaccttgttgggcggtgcgcgcaacttctcgtttaagagctaagctgcgtaaagtctgctggtga

SEQ ID NO: 3207 - DNA, 84 bp, Artificial Sequence
  Synthetic
tatgaaccactaaggcgtccaccttgttggggaagctggagctgttgcggtttaagagctaagctgcgtaaagtctgctggtga

SEQ ID NO: 3208 - DNA, 84 bp, Artificial Sequence
  Synthetic
tatgaaccactaaggcgtccaccttgttggagccagagcggcgcagtgggtttaagagctaagctgcgtaaagtctgctggtga

SEQ ID NO: 3209 - DNA, 84 bp, Artificial Sequence
  Synthetic
tatgaaccactaaggcgtccaccttgttggagtagccagagcggcgcaggtttaagagctaagctgcgtaaagtctgctggtga

SEQ ID NO: 3210 - DNA, 84 bp, Artificial Sequence
  Synthetic
tatgaaccactaaggcgtccaccttgttggcgctctggctacttttctcgtttaagagctaagctgcgtaaagtctgctggtga

SEQ ID NO: 3211 - DNA, 84 bp, Artificial Sequence
  Synthetic
tatgaaccactaaggcgtccaccttgttgggaatcctgtgatcgcagaagtttaagagctaagctgcgtaaagtctgctggtga

SEQ ID NO: 3212 - DNA, 84 bp, Artificial Sequence
  Synthetic
tatgaaccactaaggcgtccaccttgttgggcgatcacaggattcccgggtttaagagctaagctgcgtaaagtctgctggtga

SEQ ID NO: 3213 - DNA, 84 bp, Artificial Sequence
  Synthetic
tatgaaccactaaggcgtccaccttgttgggcggctggcgggaaacccagtttaagagctaagctgcgtaaagtctgctggtga

SEQ ID NO: 3214 - DNA, 84 bp, Artificial Sequence
  Synthetic
tatgaaccactaaggcgtccaccttgttggaggcttcgagctgtccgaagtttaagagctaagctgcgtaaagtctgctggtga

SEQ ID NO: 3215 - DNA, 84 bp, Artificial Sequence
  Synthetic
tatgaaccactaaggcgtccaccttgttggctcaggctgaggagaaggtgtttaagagctaagctgcgtaaagtctgctggtga

SEQ ID NO: 3216 - DNA, 84 bp, Artificial Sequence
  Synthetic
tatgaaccactaaggcgtccaccttgttggtcgtctggggctccacggagtttaagagctaagctgcgtaaagtctgctggtga

SEQ ID NO: 3217 - DNA, 84 bp, Artificial Sequence
  Synthetic
tatgaaccactaaggcgtccaccttgttgggaagcggccgggctggatcgtttaagagctaagctgcgtaaagtctgctggtga

SEQ ID NO: 3218 - DNA, 84 bp, Artificial Sequence
  Synthetic
tatgaaccactaaggcgtccaccttgttggggagaaacccttaggccgcgtttaagagctaagctgcgtaaagtctgctggtga

SEQ ID NO: 3219 - DNA, 84 bp, Artificial Sequence
  Synthetic
tatgaaccactaaggcgtccaccttgttgggtgctgtcgtagttggagggtttaagagctaagctgcgtaaagtctgctggtga

SEQ ID NO: 3220 - DNA, 84 bp, Artificial Sequence
  Synthetic
tatgaaccactaaggcgtccaccttgttggacgggtggcggccctcgacgtttaagagctaagctgcgtaaagtctgctggtga

SEQ ID NO: 3221 - DNA, 84 bp, Artificial Sequence
  Synthetic
tatgaaccactaaggcgtccaccttgttggctggctgacagctggggacgtttaagagctaagctgcgtaaagtctgctggtga

SEQ ID NO: 3222 - DNA, 84 bp, Artificial Sequence
  Synthetic
tatgaaccactaaggcgtccaccttgttgggccagctcagagttttcgcgtttaagagctaagctgcgtaaagtctgctggtga

SEQ ID NO: 3223 - DNA, 84 bp, Artificial Sequence
  Synthetic
tatgaaccactaaggcgtccaccttgttggaacggccgcatggtaactcgtttaagagctaagctgcgtaaagtctgctggtga

SEQ ID NO: 3224 - DNA, 84 bp, Artificial Sequence
  Synthetic
tatgaaccactaaggcgtccaccttgttggcgcatggtaactcaggcgcgtttaagagctaagctgcgtaaagtctgctggtga

SEQ ID NO: 3225 - DNA, 84 bp, Artificial Sequence
  Synthetic
tatgaaccactaaggcgtccaccttgttggggccaggagaacgcgcgaggtttaagagctaagctgcgtaaagtctgctggtga

SEQ ID NO: 3226 - DNA, 84 bp, Artificial Sequence
  Synthetic
tatgaaccactaaggcgtccaccttgttggcatgcacccacacttacaagtttaagagctaagctgcgtaaagtctgctggtga

SEQ ID NO: 3227 - DNA, 84 bp, Artificial Sequence
  Synthetic
tatgaaccactaaggcgtccaccttgttggtgcgctttacggaaacgaggtttaagagctaagctgcgtaaagtctgctggtga

SEQ ID NO: 3228 - DNA, 84 bp, Artificial Sequence
  Synthetic
tatgaaccactaaggcgtccaccttgttggtggcagttggtgagcatcagtttaagagctaagctgcgtaaagtctgctggtga

SEQ ID NO: 3229 - DNA, 84 bp, Artificial Sequence
  Synthetic
tatgaaccactaaggcgtccaccttgttggcggttggcttgagcgggacgtttaagagctaagctgcgtaaagtctgctggtga

SEQ ID NO: 3230 - DNA, 84 bp, Artificial Sequence
  Synthetic
tatgaaccactaaggcgtccaccttgttggggaggcggcacagtatgacgtttaagagctaagctgcgtaaagtctgctggtga

SEQ ID NO: 3231 - DNA, 84 bp, Artificial Sequence
  Synthetic
tatgaaccactaaggcgtccaccttgttggttgagcgggaccggagctggtttaagagctaagctgcgtaaagtctgctggtga

SEQ ID NO: 3232 - DNA, 84 bp, Artificial Sequence
  Synthetic
tatgaaccactaaggcgtccaccttgttggaaggggaattggtaaaccagtttaagagctaagctgcgtaaagtctgctggtga

SEQ ID NO: 3233 - DNA, 84 bp, Artificial Sequence
  Synthetic
tatgaaccactaaggcgtccaccttgttggctgctgacatcctggatctgtttaagagctaagctgcgtaaagtctgctggtga

SEQ ID NO: 3234 - DNA, 84 bp, Artificial Sequence
  Synthetic
tatgaaccactaaggcgtccaccttgttggtgaagtacatgggataattgtttaagagctaagctgcgtaaagtctgctggtga

SEQ ID NO: 3235 - DNA, 84 bp, Artificial Sequence
  Synthetic
tatgaaccactaaggcgtccaccttgttggagtctgcatcccaatatcagtttaagagctaagctgcgtaaagtctgctggtga

SEQ ID NO: 3236 - DNA, 84 bp, Artificial Sequence
  Synthetic
tatgaaccactaaggcgtccaccttgttggctccagtctatcactgcaggtttaagagctaagctgcgtaaagtctgctggtga

SEQ ID NO: 3237 - DNA, 84 bp, Artificial Sequence
  Synthetic
tatgaaccactaaggcgtccaccttgttgggcatcccaatatcaaggtagtttaagagctaagctgcgtaaagtctgctggtga

SEQ ID NO: 3238 - DNA, 84 bp, Artificial Sequence
  Synthetic
tatgaaccactaaggcgtccaccttgttggcagccgcctccgaagatgggtttaagagctaagctgcgtaaagtctgctggtga

SEQ ID NO: 3239 - DNA, 84 bp, Artificial Sequence
  Synthetic
tatgaaccactaaggcgtccaccttgttgggaggccgcaggtccgaccggtttaagagctaagctgcgtaaagtctgctggtga

SEQ ID NO: 3240 - DNA, 84 bp, Artificial Sequence
  Synthetic
tatgaaccactaaggcgtccaccttgttgggcagctgcttcatcgggaggtttaagagctaagctgcgtaaagtctgctggtga

SEQ ID NO: 3241 - DNA, 84 bp, Artificial Sequence
  Synthetic
tatgaaccactaaggcgtccaccttgttggacatccagctgctcagtcggtttaagagctaagctgcgtaaagtctgctggtga

SEQ ID NO: 3242 - DNA, 84 bp, Artificial Sequence
  Synthetic
tatgaaccactaaggcgtccaccttgttggacgacacggccttgtgggagtttaagagctaagctgcgtaaagtctgctggtga

SEQ ID NO: 3243 - DNA, 84 bp, Artificial Sequence
  Synthetic
tatgaaccactaaggcgtccaccttgttgggcttgaggagaccacgtgggtttaagagctaagctgcgtaaagtctgctggtga

SEQ ID NO: 3244 - DNA, 84 bp, Artificial Sequence
  Synthetic
tatgaaccactaaggcgtccaccttgttggagagcggggcccggtatgggtttaagagctaagctgcgtaaagtctgctggtga

SEQ ID NO: 3245 - DNA, 84 bp, Artificial Sequence
  Synthetic
tatgaaccactaaggcgtccaccttgttggcctagagcggggcccggtagtttaagagctaagctgcgtaaagtctgctggtga

SEQ ID NO: 3246 - DNA, 84 bp, Artificial Sequence
  Synthetic
tatgaaccactaaggcgtccaccttgttgggccgacgccagccagagaggtttaagagctaagctgcgtaaagtctgctggtga

SEQ ID NO: 3247 - DNA, 84 bp, Artificial Sequence
  Synthetic
tatgaaccactaaggcgtccaccttgttggcggcggtagttccaggcgagtttaagagctaagctgcgtaaagtctgctggtga

SEQ ID NO: 3248 - DNA, 84 bp, Artificial Sequence
  Synthetic
tatgaaccactaaggcgtccaccttgttggcggtagttccaggcgacgggtttaagagctaagctgcgtaaagtctgctggtga

SEQ ID NO: 3249 - DNA, 84 bp, Artificial Sequence
  Synthetic
tatgaaccactaaggcgtccaccttgttgggcgacggcggacggtggtagtttaagagctaagctgcgtaaagtctgctggtga

SEQ ID NO: 3250 - DNA, 84 bp, Artificial Sequence
  Synthetic
tatgaaccactaaggcgtccaccttgttggccggatcccggaggacagagtttaagagctaagctgcgtaaagtctgctggtga

SEQ ID NO: 3251 - DNA, 84 bp, Artificial Sequence
  Synthetic
tatgaaccactaaggcgtccaccttgttggctgatggggcaaccgccaagtttaagagctaagctgcgtaaagtctgctggtga

SEQ ID NO: 3252 - DNA, 84 bp, Artificial Sequence
  Synthetic
tatgaaccactaaggcgtccaccttgttgggggcaaccgccaacggctggtttaagagctaagctgcgtaaagtctgctggtga

SEQ ID NO: 3253 - DNA, 84 bp, Artificial Sequence
  Synthetic
tatgaaccactaaggcgtccaccttgttgggactcaggcctccgtgtgggtttaagagctaagctgcgtaaagtctgctggtga

SEQ ID NO: 3254 - DNA, 84 bp, Artificial Sequence
  Synthetic
tatgaaccactaaggcgtccaccttgttgggcgtcggaggcggtagtgagtttaagagctaagctgcgtaaagtctgctggtga

SEQ ID NO: 3255 - DNA, 84 bp, Artificial Sequence
  Synthetic
tatgaaccactaaggcgtccaccttgttggtcggaggcggtagtgacgggtttaagagctaagctgcgtaaagtctgctggtga

SEQ ID NO: 3256 - DNA, 84 bp, Artificial Sequence
  Synthetic
tatgaaccactaaggcgtccaccttgttgggcccggcagctaggcgctggtttaagagctaagctgcgtaaagtctgctggtga

SEQ ID NO: 3257 - DNA, 84 bp, Artificial Sequence
  Synthetic
tatgaaccactaaggcgtccaccttgttggtggagcccgggaagctcaagtttaagagctaagctgcgtaaagtctgctggtga

SEQ ID NO: 3258 - DNA, 84 bp, Artificial Sequence
  Synthetic
tatgaaccactaaggcgtccaccttgttggtggtttctgggtctcccgggtttaagagctaagctgcgtaaagtctgctggtga

SEQ ID NO: 3259 - DNA, 84 bp, Artificial Sequence
  Synthetic
tatgaaccactaaggcgtccaccttgttggagacgcgctcacctccggggtttaagagctaagctgcgtaaagtctgctggtga

SEQ ID NO: 3260 - DNA, 84 bp, Artificial Sequence
  Synthetic
tatgaaccactaaggcgtccaccttgttggaggatgtcggtgaattacggtttaagagctaagctgcgtaaagtctgctggtga

SEQ ID NO: 3261 - DNA, 84 bp, Artificial Sequence
  Synthetic
tatgaaccactaaggcgtccaccttgttggggcaagtgcggcctcccgggtttaagagctaagctgcgtaaagtctgctggtga

SEQ ID NO: 3262 - DNA, 84 bp, Artificial Sequence
  Synthetic
tatgaaccactaaggcgtccaccttgttggagacagagcgacttggtgagtttaagagctaagctgcgtaaagtctgctggtga

SEQ ID NO: 3263 - DNA, 84 bp, Artificial Sequence
  Synthetic
tatgaaccactaaggcgtccaccttgttggctccacggcccgaaggggtgtttaagagctaagctgcgtaaagtctgctggtga

SEQ ID NO: 3264 - DNA, 84 bp, Artificial Sequence
  Synthetic
tatgaaccactaaggcgtccaccttgttggtgatggagacagagcgactgtttaagagctaagctgcgtaaagtctgctggtga

SEQ ID NO: 3265 - DNA, 84 bp, Artificial Sequence
  Synthetic
tatgaaccactaaggcgtccaccttgttggacaggagaggggcacgtacgtttaagagctaagctgcgtaaagtctgctggtga

SEQ ID NO: 3266 - DNA, 84 bp, Artificial Sequence
  Synthetic
tatgaaccactaaggcgtccaccttgttgggctctcggggactatccgggtttaagagctaagctgcgtaaagtctgctggtga

SEQ ID NO: 3267 - DNA, 84 bp, Artificial Sequence
  Synthetic
tatgaaccactaaggcgtccaccttgttggcaagctctcggggactatcgtttaagagctaagctgcgtaaagtctgctggtga

SEQ ID NO: 3268 - DNA, 84 bp, Artificial Sequence
  Synthetic
tatgaaccactaaggcgtccaccttgttgggggtgtagaagtccgaccggtttaagagctaagctgcgtaaagtctgctggtga

SEQ ID NO: 3269 - DNA, 84 bp, Artificial Sequence
  Synthetic
tatgaaccactaaggcgtccaccttgttgggtgcccctctcctgtctgggtttaagagctaagctgcgtaaagtctgctggtga

SEQ ID NO: 3270 - DNA, 84 bp, Artificial Sequence
  Synthetic
tatgaaccactaaggcgtccaccttgttggccgcggcggcgccggaggtgtttaagagctaagctgcgtaaagtctgctggtga

SEQ ID NO: 3271 - DNA, 84 bp, Artificial Sequence
  Synthetic
tatgaaccactaaggcgtccaccttgttggcgttaagaaggtgccgcgggtttaagagctaagctgcgtaaagtctgctggtga

SEQ ID NO: 3272 - DNA, 84 bp, Artificial Sequence
  Synthetic
tatgaaccactaaggcgtccaccttgttggctgggagtcggcacccggggtttaagagctaagctgcgtaaagtctgctggtga

SEQ ID NO: 3273 - DNA, 84 bp, Artificial Sequence
  Synthetic
tatgaaccactaaggcgtccaccttgttggcccagagtacagaaacagagtttaagagctaagctgcgtaaagtctgctggtga

SEQ ID NO: 3274 - DNA, 84 bp, Artificial Sequence
  Synthetic
tatgaaccactaaggcgtccaccttgttggtactctgggtgactcagaggtttaagagctaagctgcgtaaagtctgctggtga

SEQ ID NO: 3275 - DNA, 84 bp, Artificial Sequence
  Synthetic
tatgaaccactaaggcgtccaccttgttggttgctcgcgaggagtgtgcgtttaagagctaagctgcgtaaagtctgctggtga

SEQ ID NO: 3276 - DNA, 84 bp, Artificial Sequence
  Synthetic
tatgaaccactaaggcgtccaccttgttgggccgccgccgccaaacgaggtttaagagctaagctgcgtaaagtctgctggtga

SEQ ID NO: 3277 - DNA, 84 bp, Artificial Sequence
  Synthetic
tatgaaccactaaggcgtccaccttgttgggcttcccctcgtttggcgggtttaagagctaagctgcgtaaagtctgctggtga

SEQ ID NO: 3278 - DNA, 84 bp, Artificial Sequence
  Synthetic
tatgaaccactaaggcgtccaccttgttggggaggcgccgggaagtcgagtttaagagctaagctgcgtaaagtctgctggtga

SEQ ID NO: 3279 - DNA, 84 bp, Artificial Sequence
  Synthetic
tatgaaccactaaggcgtccaccttgttgggccgtgaggtaagcgccgggtttaagagctaagctgcgtaaagtctgctggtga

SEQ ID NO: 3280 - DNA, 84 bp, Artificial Sequence
  Synthetic
tatgaaccactaaggcgtccaccttgttggggtggaacctagagccccggtttaagagctaagctgcgtaaagtctgctggtga

SEQ ID NO: 3281 - DNA, 84 bp, Artificial Sequence
  Synthetic
tatgaaccactaaggcgtccaccttgttggtggaaggcgcgctctcggggtttaagagctaagctgcgtaaagtctgctggtga

SEQ ID NO: 3282 - DNA, 84 bp, Artificial Sequence
  Synthetic
tatgaaccactaaggcgtccaccttgttggagaggtggagtgcatgctagtttaagagctaagctgcgtaaagtctgctggtga

SEQ ID NO: 3283 - DNA, 84 bp, Artificial Sequence
  Synthetic
tatgaaccactaaggcgtccaccttgttggatccgcccggaagttgacggtttaagagctaagctgcgtaaagtctgctggtga

SEQ ID NO: 3284 - DNA, 84 bp, Artificial Sequence
  Synthetic
tatgaaccactaaggcgtccaccttgttggcagctgagaggaagctgatgtttaagagctaagctgcgtaaagtctgctggtga

SEQ ID NO: 3285 - DNA, 84 bp, Artificial Sequence
  Synthetic
tatgaaccactaaggcgtccaccttgttggaggcctggccgctacaatagtttaagagctaagctgcgtaaagtctgctggtga

SEQ ID NO: 3286 - DNA, 84 bp, Artificial Sequence
  Synthetic
tatgaaccactaaggcgtccaccttgttggatccaagtggagatcgtaggtttaagagctaagctgcgtaaagtctgctggtga

SEQ ID NO: 3287 - DNA, 84 bp, Artificial Sequence
  Synthetic
tatgaaccactaaggcgtccaccttgttggtgtagcggccaggcctgaagtttaagagctaagctgcgtaaagtctgctggtga

SEQ ID NO: 3288 - DNA, 84 bp, Artificial Sequence
  Synthetic
tatgaaccactaaggcgtccaccttgttgggccgccgcagacgacgaccgtttaagagctaagctgcgtaaagtctgctggtga

SEQ ID NO: 3289 - DNA, 84 bp, Artificial Sequence
  Synthetic
tatgaaccactaaggcgtccaccttgttgggcctggtcgtcgtctgcgggtttaagagctaagctgcgtaaagtctgctggtga

SEQ ID NO: 3290 - DNA, 84 bp, Artificial Sequence
  Synthetic
tatgaaccactaaggcgtccaccttgttgggcggcctggtcgtcgtctggtttaagagctaagctgcgtaaagtctgctggtga

SEQ ID NO: 3291 - DNA, 84 bp, Artificial Sequence
  Synthetic
tatgaaccactaaggcgtccaccttgttggagaacctcggaacatacgggtttaagagctaagctgcgtaaagtctgctggtga

SEQ ID NO: 3292 - DNA, 84 bp, Artificial Sequence
  Synthetic
tatgaaccactaaggcgtccaccttgttggctagtcgcctccagagtgagtttaagagctaagctgcgtaaagtctgctggtga

SEQ ID NO: 3293 - DNA, 84 bp, Artificial Sequence
  Synthetic
tatgaaccactaaggcgtccaccttgttgggagatacccctcactctgggtttaagagctaagctgcgtaaagtctgctggtga

SEQ ID NO: 3294 - DNA, 84 bp, Artificial Sequence
  Synthetic
tatgaaccactaaggcgtccaccttgttggacgccacgagggacaacaagtttaagagctaagctgcgtaaagtctgctggtga

SEQ ID NO: 3295 - DNA, 84 bp, Artificial Sequence
  Synthetic
tatgaaccactaaggcgtccaccttgttgggccaggctgtggggacgacgtttaagagctaagctgcgtaaagtctgctggtga

SEQ ID NO: 3296 - DNA, 84 bp, Artificial Sequence
  Synthetic
tatgaaccactaaggcgtccaccttgttggggtgcgcgcgggaacgaccgtttaagagctaagctgcgtaaagtctgctggtga

SEQ ID NO: 3297 - DNA, 84 bp, Artificial Sequence
  Synthetic
tatgaaccactaaggcgtccaccttgttggacgttgtcgaactgggtcagtttaagagctaagctgcgtaaagtctgctggtga

SEQ ID NO: 3298 - DNA, 84 bp, Artificial Sequence
  Synthetic
tatgaaccactaaggcgtccaccttgttggcccgagccggagaagatgggtttaagagctaagctgcgtaaagtctgctggtga

SEQ ID NO: 3299 - DNA, 84 bp, Artificial Sequence
  Synthetic
tatgaaccactaaggcgtccaccttgttgggggcgggacaaagggaccggtttaagagctaagctgcgtaaagtctgctggtga

SEQ ID NO: 3300 - DNA, 84 bp, Artificial Sequence
  Synthetic
tatgaaccactaaggcgtccaccttgttggctcagggcagcgagactatgtttaagagctaagctgcgtaaagtctgctggtga

SEQ ID NO: 3301 - DNA, 84 bp, Artificial Sequence
  Synthetic
tatgaaccactaaggcgtccaccttgttgggatagagcggggcgactaggtttaagagctaagctgcgtaaagtctgctggtga

SEQ ID NO: 3302 - DNA, 84 bp, Artificial Sequence
  Synthetic
tatgaaccactaaggcgtccaccttgttgggccggccggccggcacggggtttaagagctaagctgcgtaaagtctgctggtga

SEQ ID NO: 3303 - DNA, 84 bp, Artificial Sequence
  Synthetic
tatgaaccactaaggcgtccaccttgttgggacgggacggagcgatgtcgtttaagagctaagctgcgtaaagtctgctggtga

SEQ ID NO: 3304 - DNA, 84 bp, Artificial Sequence
  Synthetic
tatgaaccactaaggcgtccaccttgttgggagcccggagtccggatcggtttaagagctaagctgcgtaaagtctgctggtga

SEQ ID NO: 3305 - DNA, 84 bp, Artificial Sequence
  Synthetic
tatgaaccactaaggcgtccaccttgttgggcacggagtggactcgacggtttaagagctaagctgcgtaaagtctgctggtga

SEQ ID NO: 3306 - DNA, 84 bp, Artificial Sequence
  Synthetic
tatgaaccactaaggcgtccaccttgttggaagctccggacgcgagggggtttaagagctaagctgcgtaaagtctgctggtga

SEQ ID NO: 3307 - DNA, 84 bp, Artificial Sequence
  Synthetic
tatgaaccactaaggcgtccaccttgttggcttggaaacactcacccgcgtttaagagctaagctgcgtaaagtctgctggtga

SEQ ID NO: 3308 - DNA, 84 bp, Artificial Sequence
  Synthetic
tatgaaccactaaggcgtccaccttgttggggggcgagcgcgggacaaagtttaagagctaagctgcgtaaagtctgctggtga

SEQ ID NO: 3309 - DNA, 84 bp, Artificial Sequence
  Synthetic
tatgaaccactaaggcgtccaccttgttgggccgtacgcccgagaactggtttaagagctaagctgcgtaaagtctgctggtga

SEQ ID NO: 3310 - DNA, 84 bp, Artificial Sequence
  Synthetic
tatgaaccactaaggcgtccaccttgttgggaactgaggtagcccgcgcgtttaagagctaagctgcgtaaagtctgctggtga

SEQ ID NO: 3311 - DNA, 84 bp, Artificial Sequence
  Synthetic
tatgaaccactaaggcgtccaccttgttgggcgccggcggcagtaggacgtttaagagctaagctgcgtaaagtctgctggtga

SEQ ID NO: 3312 - DNA, 84 bp, Artificial Sequence
  Synthetic
tatgaaccactaaggcgtccaccttgttggcgcgggcgcttgataacgcgtttaagagctaagctgcgtaaagtctgctggtga

SEQ ID NO: 3313 - DNA, 84 bp, Artificial Sequence
  Synthetic
tatgaaccactaaggcgtccaccttgttggtaacgcgggtgaggcgtgggtttaagagctaagctgcgtaaagtctgctggtga

SEQ ID NO: 3314 - DNA, 84 bp, Artificial Sequence
  Synthetic
tatgaaccactaaggcgtccaccttgttggtgataacgcgggtgaggcggtttaagagctaagctgcgtaaagtctgctggtga

SEQ ID NO: 3315 - DNA, 84 bp, Artificial Sequence
  Synthetic
tatgaaccactaaggcgtccaccttgttggaagtctggcccggcccaacgtttaagagctaagctgcgtaaagtctgctggtga

SEQ ID NO: 3316 - DNA, 84 bp, Artificial Sequence
  Synthetic
tatgaaccactaaggcgtccaccttgttgggcgggtgttgagagcggtggtttaagagctaagctgcgtaaagtctgctggtga

SEQ ID NO: 3317 - DNA, 84 bp, Artificial Sequence
  Synthetic
tatgaaccactaaggcgtccaccttgttgggtgcgtgagcacggccggtgtttaagagctaagctgcgtaaagtctgctggtga

SEQ ID NO: 3318 - DNA, 84 bp, Artificial Sequence
  Synthetic
tatgaaccactaaggcgtccaccttgttggcagcaaccgcacggccgcagtttaagagctaagctgcgtaaagtctgctggtga

SEQ ID NO: 3319 - DNA, 84 bp, Artificial Sequence
  Synthetic
tatgaaccactaaggcgtccaccttgttggccccggagcagcaaccgcagtttaagagctaagctgcgtaaagtctgctggtga

SEQ ID NO: 3320 - DNA, 84 bp, Artificial Sequence
  Synthetic
tatgaaccactaaggcgtccaccttgttgggtccagcctgtggagacaggtttaagagctaagctgcgtaaagtctgctggtga

SEQ ID NO: 3321 - DNA, 84 bp, Artificial Sequence
  Synthetic
tatgaaccactaaggcgtccaccttgttggccggagccgaaacaccggtgtttaagagctaagctgcgtaaagtctgctggtga

SEQ ID NO: 3322 - DNA, 84 bp, Artificial Sequence
  Synthetic
tatgaaccactaaggcgtccaccttgttggccggtaggagcggggaggtgtttaagagctaagctgcgtaaagtctgctggtga

SEQ ID NO: 3323 - DNA, 84 bp, Artificial Sequence
  Synthetic
tatgaaccactaaggcgtccaccttgttggggacccggagccgaaacacgtttaagagctaagctgcgtaaagtctgctggtga

SEQ ID NO: 3324 - DNA, 84 bp, Artificial Sequence
  Synthetic
tatgaaccactaaggcgtccaccttgttggaatttctatgtatccagaagtttaagagctaagctgcgtaaagtctgctggtga

SEQ ID NO: 3325 - DNA, 84 bp, Artificial Sequence
  Synthetic
tatgaaccactaaggcgtccaccttgttggatggtccaagtcaattccagtttaagagctaagctgcgtaaagtctgctggtga

SEQ ID NO: 3326 - DNA, 84 bp, Artificial Sequence
  Synthetic
tatgaaccactaaggcgtccaccttgttggcttctgtctatcacataaggtttaagagctaagctgcgtaaagtctgctggtga

SEQ ID NO: 3327 - DNA, 84 bp, Artificial Sequence
  Synthetic
tatgaaccactaaggcgtccaccttgttggcggcggcaccaagtatccggtttaagagctaagctgcgtaaagtctgctggtga

SEQ ID NO: 3328 - DNA, 84 bp, Artificial Sequence
  Synthetic
tatgaaccactaaggcgtccaccttgttgggccagtcattccagctccggtttaagagctaagctgcgtaaagtctgctggtga

SEQ ID NO: 3329 - DNA, 84 bp, Artificial Sequence
  Synthetic
tatgaaccactaaggcgtccaccttgttggttccagctccgcggatactgtttaagagctaagctgcgtaaagtctgctggtga

SEQ ID NO: 3330 - DNA, 84 bp, Artificial Sequence
  Synthetic
tatgaaccactaaggcgtccaccttgttggaaggaaccggaaacgggatgtttaagagctaagctgcgtaaagtctgctggtga

SEQ ID NO: 3331 - DNA, 84 bp, Artificial Sequence
  Synthetic
tatgaaccactaaggcgtccaccttgttggggaccaggtgaggaagtaggtttaagagctaagctgcgtaaagtctgctggtga

SEQ ID NO: 3332 - DNA, 84 bp, Artificial Sequence
  Synthetic
tatgaaccactaaggcgtccaccttgttggtgggaatccgggactgtgggtttaagagctaagctgcgtaaagtctgctggtga

SEQ ID NO: 3333 - DNA, 84 bp, Artificial Sequence
  Synthetic
tatgaaccactaaggcgtccaccttgttggaagatggcgctcaccaggtgtttaagagctaagctgcgtaaagtctgctggtga

SEQ ID NO: 3334 - DNA, 84 bp, Artificial Sequence
  Synthetic
tatgaaccactaaggcgtccaccttgttggtcgctcgcgctggaagaaggtttaagagctaagctgcgtaaagtctgctggtga

SEQ ID NO: 3335 - DNA, 84 bp, Artificial Sequence
  Synthetic
tatgaaccactaaggcgtccaccttgttgggagcgggtgaactaaacccgtttaagagctaagctgcgtaaagtctgctggtga

SEQ ID NO: 3336 - DNA, 84 bp, Artificial Sequence
  Synthetic
tatgaaccactaaggcgtccaccttgttggccccgtacggataccggaagtttaagagctaagctgcgtaaagtctgctggtga

SEQ ID NO: 3337 - DNA, 84 bp, Artificial Sequence
  Synthetic
tatgaaccactaaggcgtccaccttgttggccggaaaggctggatacctgtttaagagctaagctgcgtaaagtctgctggtga

SEQ ID NO: 3338 - DNA, 84 bp, Artificial Sequence
  Synthetic
tatgaaccactaaggcgtccaccttgttgggaagagaacctcccccgtagtttaagagctaagctgcgtaaagtctgctggtga

SEQ ID NO: 3339 - DNA, 84 bp, Artificial Sequence
  Synthetic
tatgaaccactaaggcgtccaccttgttggaagggcgcagcctaggacagtttaagagctaagctgcgtaaagtctgctggtga

SEQ ID NO: 3340 - DNA, 84 bp, Artificial Sequence
  Synthetic
tatgaaccactaaggcgtccaccttgttggacgaggcctcgggccccatgtttaagagctaagctgcgtaaagtctgctggtga

SEQ ID NO: 3341 - DNA, 84 bp, Artificial Sequence
  Synthetic
tatgaaccactaaggcgtccaccttgttgggcacgcagccacgccccaagtttaagagctaagctgcgtaaagtctgctggtga

SEQ ID NO: 3342 - DNA, 84 bp, Artificial Sequence
  Synthetic
tatgaaccactaaggcgtccaccttgttggaccccaagccgcctagccggtttaagagctaagctgcgtaaagtctgctggtga

SEQ ID NO: 3343 - DNA, 84 bp, Artificial Sequence
  Synthetic
tatgaaccactaaggcgtccaccttgttggatctcctaggagctagtccgtttaagagctaagctgcgtaaagtctgctggtga

SEQ ID NO: 3344 - DNA, 84 bp, Artificial Sequence
  Synthetic
tatgaaccactaaggcgtccaccttgttgggagatgccggctctcgagagtttaagagctaagctgcgtaaagtctgctggtga

SEQ ID NO: 3345 - DNA, 84 bp, Artificial Sequence
  Synthetic
tatgaaccactaaggcgtccaccttgttggagcatttccgggcctcctggtttaagagctaagctgcgtaaagtctgctggtga

SEQ ID NO: 3346 - DNA, 84 bp, Artificial Sequence
  Synthetic
tatgaaccactaaggcgtccaccttgttgggattccgagcgagtggtgggtttaagagctaagctgcgtaaagtctgctggtga

SEQ ID NO: 3347 - DNA, 84 bp, Artificial Sequence
  Synthetic
tatgaaccactaaggcgtccaccttgttggtcagtccgtcgggagggctgtttaagagctaagctgcgtaaagtctgctggtga

SEQ ID NO: 3348 - DNA, 84 bp, Artificial Sequence
  Synthetic
tatgaaccactaaggcgtccaccttgttggcggcagagcgagcccgcaggtttaagagctaagctgcgtaaagtctgctggtga

SEQ ID NO: 3349 - DNA, 84 bp, Artificial Sequence
  Synthetic
tatgaaccactaaggcgtccaccttgttgggctcggcgcacggatatgggtttaagagctaagctgcgtaaagtctgctggtga

SEQ ID NO: 3350 - DNA, 84 bp, Artificial Sequence
  Synthetic
tatgaaccactaaggcgtccaccttgttggggagacgtggtgccgctgcgtttaagagctaagctgcgtaaagtctgctggtga

SEQ ID NO: 3351 - DNA, 84 bp, Artificial Sequence
  Synthetic
tatgaaccactaaggcgtccaccttgttggcgggtgaacggcaaactgggtttaagagctaagctgcgtaaagtctgctggtga

SEQ ID NO: 3352 - DNA, 84 bp, Artificial Sequence
  Synthetic
tatgaaccactaaggcgtccaccttgttgggacttgccgatagtggtgagtttaagagctaagctgcgtaaagtctgctggtga

SEQ ID NO: 3353 - DNA, 84 bp, Artificial Sequence
  Synthetic
tatgaaccactaaggcgtccaccttgttgggctcgggacttgccgataggtttaagagctaagctgcgtaaagtctgctggtga

SEQ ID NO: 3354 - DNA, 84 bp, Artificial Sequence
  Synthetic
tatgaaccactaaggcgtccaccttgttggctgctcgggttagatcgtcgtttaagagctaagctgcgtaaagtctgctggtga

SEQ ID NO: 3355 - DNA, 84 bp, Artificial Sequence
  Synthetic
tatgaaccactaaggcgtccaccttgttggggacaccctttaccgaagagtttaagagctaagctgcgtaaagtctgctggtga

SEQ ID NO: 3356 - DNA, 84 bp, Artificial Sequence
  Synthetic
tatgaaccactaaggcgtccaccttgttgggggttagatcgtcaggtgagtttaagagctaagctgcgtaaagtctgctggtga

SEQ ID NO: 3357 - DNA, 84 bp, Artificial Sequence
  Synthetic
tatgaaccactaaggcgtccaccttgttggcacgcgggaaaagcttcccgtttaagagctaagctgcgtaaagtctgctggtga

SEQ ID NO: 3358 - DNA, 84 bp, Artificial Sequence
  Synthetic
tatgaaccactaaggcgtccaccttgttggcctctctgtggcctgtgtagtttaagagctaagctgcgtaaagtctgctggtga

SEQ ID NO: 3359 - DNA, 84 bp, Artificial Sequence
  Synthetic
tatgaaccactaaggcgtccaccttgttgggcctgtgtacggcttccgggtttaagagctaagctgcgtaaagtctgctggtga

SEQ ID NO: 3360 - DNA, 84 bp, Artificial Sequence
  Synthetic
tatgaaccactaaggcgtccaccttgttggatcctaacccgccatctgggtttaagagctaagctgcgtaaagtctgctggtga

SEQ ID NO: 3361 - DNA, 84 bp, Artificial Sequence
  Synthetic
tatgaaccactaaggcgtccaccttgttggcaccgcggccagcagaggggtttaagagctaagctgcgtaaagtctgctggtga

SEQ ID NO: 3362 - DNA, 84 bp, Artificial Sequence
  Synthetic
tatgaaccactaaggcgtccaccttgttggtgccaccagatggcgggttgtttaagagctaagctgcgtaaagtctgctggtga

SEQ ID NO: 3363 - DNA, 84 bp, Artificial Sequence
  Synthetic
tatgaaccactaaggcgtccaccttgttggaactgctggggaaggcgatgtttaagagctaagctgcgtaaagtctgctggtga

SEQ ID NO: 3364 - DNA, 84 bp, Artificial Sequence
  Synthetic
tatgaaccactaaggcgtccaccttgttggagtcgggcctcggaagggagtttaagagctaagctgcgtaaagtctgctggtga

SEQ ID NO: 3365 - DNA, 84 bp, Artificial Sequence
  Synthetic
tatgaaccactaaggcgtccaccttgttggcgcgctggagatgatgggggtttaagagctaagctgcgtaaagtctgctggtga

SEQ ID NO: 3366 - DNA, 84 bp, Artificial Sequence
  Synthetic
tatgaaccactaaggcgtccaccttgttggcaccctcgaattctactcagtttaagagctaagctgcgtaaagtctgctggtga

SEQ ID NO: 3367 - DNA, 84 bp, Artificial Sequence
  Synthetic
tatgaaccactaaggcgtccaccttgttgggtccctgagtagaattcgagtttaagagctaagctgcgtaaagtctgctggtga

SEQ ID NO: 3368 - DNA, 84 bp, Artificial Sequence
  Synthetic
tatgaaccactaaggcgtccaccttgttggtcagggacggaagctcccggtttaagagctaagctgcgtaaagtctgctggtga

SEQ ID NO: 3369 - DNA, 84 bp, Artificial Sequence
  Synthetic
tatgaaccactaaggcgtccaccttgttggcccgccgctgcccttccgggtttaagagctaagctgcgtaaagtctgctggtga

SEQ ID NO: 3370 - DNA, 84 bp, Artificial Sequence
  Synthetic
tatgaaccactaaggcgtccaccttgttgggaatctttcgcccccggaagtttaagagctaagctgcgtaaagtctgctggtga

SEQ ID NO: 3371 - DNA, 84 bp, Artificial Sequence
  Synthetic
tatgaaccactaaggcgtccaccttgttgggcccccggaagggcagcgggtttaagagctaagctgcgtaaagtctgctggtga

SEQ ID NO: 3372 - DNA, 84 bp, Artificial Sequence
  Synthetic
tatgaaccactaaggcgtccaccttgttggcgacccgggagaaagaagtgtttaagagctaagctgcgtaaagtctgctggtga

SEQ ID NO: 3373 - DNA, 84 bp, Artificial Sequence
  Synthetic
tatgaaccactaaggcgtccaccttgttggcgggctgggagccatccaagtttaagagctaagctgcgtaaagtctgctggtga

SEQ ID NO: 3374 - DNA, 84 bp, Artificial Sequence
  Synthetic
tatgaaccactaaggcgtccaccttgttgggaagtgacgcgaggcgtaggtttaagagctaagctgcgtaaagtctgctggtga

SEQ ID NO: 3375 - DNA, 84 bp, Artificial Sequence
  Synthetic
tatgaaccactaaggcgtccaccttgttggcgaggcgccagccaatggggtttaagagctaagctgcgtaaagtctgctggtga

SEQ ID NO: 3376 - DNA, 84 bp, Artificial Sequence
  Synthetic
tatgaaccactaaggcgtccaccttgttgggccgcggccggccccgtgggtttaagagctaagctgcgtaaagtctgctggtga

SEQ ID NO: 3377 - DNA, 84 bp, Artificial Sequence
  Synthetic
tatgaaccactaaggcgtccaccttgttgggctttcccgggccccccacgtttaagagctaagctgcgtaaagtctgctggtga

SEQ ID NO: 3378 - DNA, 84 bp, Artificial Sequence
  Synthetic
tatgaaccactaaggcgtccaccttgttggcttgggcgggcccacttaggtttaagagctaagctgcgtaaagtctgctggtga

SEQ ID NO: 3379 - DNA, 84 bp, Artificial Sequence
  Synthetic
tatgaaccactaaggcgtccaccttgttgggccccgcgcacagttgcgggtttaagagctaagctgcgtaaagtctgctggtga

SEQ ID NO: 3380 - DNA, 84 bp, Artificial Sequence
  Synthetic
tatgaaccactaaggcgtccaccttgttggttaggggcggggctctagagtttaagagctaagctgcgtaaagtctgctggtga

SEQ ID NO: 3381 - DNA, 84 bp, Artificial Sequence
  Synthetic
tatgaaccactaaggcgtccaccttgttggcgagaatcacgcgaggtccgtttaagagctaagctgcgtaaagtctgctggtga

SEQ ID NO: 3382 - DNA, 84 bp, Artificial Sequence
  Synthetic
tatgaaccactaaggcgtccaccttgttggcgggtcattgggagagtgcgtttaagagctaagctgcgtaaagtctgctggtga

SEQ ID NO: 3383 - DNA, 84 bp, Artificial Sequence
  Synthetic
tatgaaccactaaggcgtccaccttgttggtgggagagtgcgggattccgtttaagagctaagctgcgtaaagtctgctggtga

SEQ ID NO: 3384 - DNA, 84 bp, Artificial Sequence
  Synthetic
tatgaaccactaaggcgtccaccttgttggaggctccggcggaccgagggtttaagagctaagctgcgtaaagtctgctggtga

SEQ ID NO: 3385 - DNA, 84 bp, Artificial Sequence
  Synthetic
tatgaaccactaaggcgtccaccttgttggccggcggaccgaggggggagtttaagagctaagctgcgtaaagtctgctggtga

SEQ ID NO: 3386 - DNA, 84 bp, Artificial Sequence
  Synthetic
tatgaaccactaaggcgtccaccttgttggccggcgggtagctggcggggtttaagagctaagctgcgtaaagtctgctggtga

SEQ ID NO: 3387 - DNA, 84 bp, Artificial Sequence
  Synthetic
tatgaaccactaaggcgtccaccttgttggcgggcggctggcagttcaagtttaagagctaagctgcgtaaagtctgctggtga

SEQ ID NO: 3388 - DNA, 84 bp, Artificial Sequence
  Synthetic
tatgaaccactaaggcgtccaccttgttggtgagcggcccggagcgcgtgtttaagagctaagctgcgtaaagtctgctggtga

SEQ ID NO: 3389 - DNA, 84 bp, Artificial Sequence
  Synthetic
tatgaaccactaaggcgtccaccttgttggtgctacatacggtctatgagtttaagagctaagctgcgtaaagtctgctggtga

SEQ ID NO: 3390 - DNA, 84 bp, Artificial Sequence
  Synthetic
tatgaaccactaaggcgtccaccttgttggcgacgctcggcggcatagggtttaagagctaagctgcgtaaagtctgctggtga

SEQ ID NO: 3391 - DNA, 84 bp, Artificial Sequence
  Synthetic
tatgaaccactaaggcgtccaccttgttggcggctccaccgacactacggtttaagagctaagctgcgtaaagtctgctggtga

SEQ ID NO: 3392 - DNA, 84 bp, Artificial Sequence
  Synthetic
tatgaaccactaaggcgtccaccttgttggggaggcgtccgcgtagtgtgtttaagagctaagctgcgtaaagtctgctggtga

SEQ ID NO: 3393 - DNA, 84 bp, Artificial Sequence
  Synthetic
tatgaaccactaaggcgtccaccttgttggcacaagcgcgcttcacctggtttaagagctaagctgcgtaaagtctgctggtga

SEQ ID NO: 3394 - DNA, 84 bp, Artificial Sequence
  Synthetic
tatgaaccactaaggcgtccaccttgttggcgcgcttgtggaggagttggtttaagagctaagctgcgtaaagtctgctggtga

SEQ ID NO: 3395 - DNA, 84 bp, Artificial Sequence
  Synthetic
tatgaaccactaaggcgtccaccttgttgggcggagaaggggccacctcgtttaagagctaagctgcgtaaagtctgctggtga

SEQ ID NO: 3396 - DNA, 84 bp, Artificial Sequence
  Synthetic
tatgaaccactaaggcgtccaccttgttggacctacccgacatgactaagtttaagagctaagctgcgtaaagtctgctggtga

SEQ ID NO: 3397 - DNA, 84 bp, Artificial Sequence
  Synthetic
tatgaaccactaaggcgtccaccttgttgggccgccctcagtacagctcgtttaagagctaagctgcgtaaagtctgctggtga

SEQ ID NO: 3398 - DNA, 84 bp, Artificial Sequence
  Synthetic
tatgaaccactaaggcgtccaccttgttggggcggccggagctgtactggtttaagagctaagctgcgtaaagtctgctggtga

SEQ ID NO: 3399 - DNA, 84 bp, Artificial Sequence
  Synthetic
tatgaaccactaaggcgtccaccttgttggactgcagatcgctggtgaggtttaagagctaagctgcgtaaagtctgctggtga

SEQ ID NO: 3400 - DNA, 84 bp, Artificial Sequence
  Synthetic
tatgaaccactaaggcgtccaccttgttgggcttcgttcgtaaggaagggtttaagagctaagctgcgtaaagtctgctggtga

SEQ ID NO: 3401 - DNA, 84 bp, Artificial Sequence
  Synthetic
tatgaaccactaaggcgtccaccttgttggttacgaacgaagcccgcgggtttaagagctaagctgcgtaaagtctgctggtga

SEQ ID NO: 3402 - DNA, 84 bp, Artificial Sequence
  Synthetic
tatgaaccactaaggcgtccaccttgttgggagacctgggcccgatggcgtttaagagctaagctgcgtaaagtctgctggtga

SEQ ID NO: 3403 - DNA, 84 bp, Artificial Sequence
  Synthetic
tatgaaccactaaggcgtccaccttgttgggctggcagtacccagacaggtttaagagctaagctgcgtaaagtctgctggtga

SEQ ID NO: 3404 - DNA, 84 bp, Artificial Sequence
  Synthetic
tatgaaccactaaggcgtccaccttgttggtctgggtactgccagccatgtttaagagctaagctgcgtaaagtctgctggtga

SEQ ID NO: 3405 - DNA, 84 bp, Artificial Sequence
  Synthetic
tatgaaccactaaggcgtccaccttgttggcgggatccgaggcaagcgtgtttaagagctaagctgcgtaaagtctgctggtga

SEQ ID NO: 3406 - DNA, 84 bp, Artificial Sequence
  Synthetic
tatgaaccactaaggcgtccaccttgttgggccgaaggggcgggatccggtttaagagctaagctgcgtaaagtctgctggtga

SEQ ID NO: 3407 - DNA, 84 bp, Artificial Sequence
  Synthetic
tatgaaccactaaggcgtccaccttgttgggccgcccaacacgtacctggtttaagagctaagctgcgtaaagtctgctggtga

SEQ ID NO: 3408 - DNA, 84 bp, Artificial Sequence
  Synthetic
tatgaaccactaaggcgtccaccttgttgggctccaccgacctaggtaagtttaagagctaagctgcgtaaagtctgctggtga

SEQ ID NO: 3409 - DNA, 84 bp, Artificial Sequence
  Synthetic
tatgaaccactaaggcgtccaccttgttggggcggcaggaagatggagtgtttaagagctaagctgcgtaaagtctgctggtga

SEQ ID NO: 3410 - DNA, 84 bp, Artificial Sequence
  Synthetic
tatgaaccactaaggcgtccaccttgttggtaaaggggcggtgcagagggtttaagagctaagctgcgtaaagtctgctggtga

SEQ ID NO: 3411 - DNA, 84 bp, Artificial Sequence
  Synthetic
tatgaaccactaaggcgtccaccttgttgggccccgagcacgagttcctgtttaagagctaagctgcgtaaagtctgctggtga

SEQ ID NO: 3412 - DNA, 84 bp, Artificial Sequence
  Synthetic
tatgaaccactaaggcgtccaccttgttgggcctctcagcgcgaatctggtttaagagctaagctgcgtaaagtctgctggtga

SEQ ID NO: 3413 - DNA, 84 bp, Artificial Sequence
  Synthetic
tatgaaccactaaggcgtccaccttgttgggtccgggcgaggctcccgcgtttaagagctaagctgcgtaaagtctgctggtga

SEQ ID NO: 3414 - DNA, 84 bp, Artificial Sequence
  Synthetic
tatgaaccactaaggcgtccaccttgttggagcgagccatttaacatgggtttaagagctaagctgcgtaaagtctgctggtga

SEQ ID NO: 3415 - DNA, 84 bp, Artificial Sequence
  Synthetic
tatgaaccactaaggcgtccaccttgttggcgttgctcggcgcctgaaggtttaagagctaagctgcgtaaagtctgctggtga

SEQ ID NO: 3416 - DNA, 84 bp, Artificial Sequence
  Synthetic
tatgaaccactaaggcgtccaccttgttgggcggaggatgtttcctcaggtttaagagctaagctgcgtaaagtctgctggtga

SEQ ID NO: 3417 - DNA, 84 bp, Artificial Sequence
  Synthetic
tatgaaccactaaggcgtccaccttgttggagtagcgacggcagcgggcgtttaagagctaagctgcgtaaagtctgctggtga

SEQ ID NO: 3418 - DNA, 84 bp, Artificial Sequence
  Synthetic
tatgaaccactaaggcgtccaccttgttggatggccgcgggagccgggagtttaagagctaagctgcgtaaagtctgctggtga

SEQ ID NO: 3419 - DNA, 84 bp, Artificial Sequence
  Synthetic
tatgaaccactaaggcgtccaccttgttgggaggaggcgggagtagcgagtttaagagctaagctgcgtaaagtctgctggtga

SEQ ID NO: 3420 - DNA, 84 bp, Artificial Sequence
  Synthetic
tatgaaccactaaggcgtccaccttgttggaactgaagagcggcggcgtgtttaagagctaagctgcgtaaagtctgctggtga

SEQ ID NO: 3421 - DNA, 84 bp, Artificial Sequence
  Synthetic
tatgaaccactaaggcgtccaccttgttggcgggcaaactgaagagcgggtttaagagctaagctgcgtaaagtctgctggtga

SEQ ID NO: 3422 - DNA, 84 bp, Artificial Sequence
  Synthetic
tatgaaccactaaggcgtccaccttgttggggcgtcggagacatcttctgtttaagagctaagctgcgtaaagtctgctggtga

SEQ ID NO: 3423 - DNA, 84 bp, Artificial Sequence
  Synthetic
tatgaaccactaaggcgtccaccttgttggctgcactctcacctgtagtgtttaagagctaagctgcgtaaagtctgctggtga

SEQ ID NO: 3424 - DNA, 84 bp, Artificial Sequence
  Synthetic
tatgaaccactaaggcgtccaccttgttgggagtttcgaactcggggaggtttaagagctaagctgcgtaaagtctgctggtga

SEQ ID NO: 3425 - DNA, 84 bp, Artificial Sequence
  Synthetic
tatgaaccactaaggcgtccaccttgttggggcttctgctactagtgaggtttaagagctaagctgcgtaaagtctgctggtga

SEQ ID NO: 3426 - DNA, 84 bp, Artificial Sequence
  Synthetic
tatgaaccactaaggcgtccaccttgttggagcaagacgcgcgagttccgtttaagagctaagctgcgtaaagtctgctggtga

SEQ ID NO: 3427 - DNA, 84 bp, Artificial Sequence
  Synthetic
tatgaaccactaaggcgtccaccttgttggcaccttggcgctgtgcgccgtttaagagctaagctgcgtaaagtctgctggtga

SEQ ID NO: 3428 - DNA, 84 bp, Artificial Sequence
  Synthetic
tatgaaccactaaggcgtccaccttgttggccacggggccatcgagccggtttaagagctaagctgcgtaaagtctgctggtga

SEQ ID NO: 3429 - DNA, 84 bp, Artificial Sequence
  Synthetic
tatgaaccactaaggcgtccaccttgttggccggggaccgcgggtagtggtttaagagctaagctgcgtaaagtctgctggtga

SEQ ID NO: 3430 - DNA, 84 bp, Artificial Sequence
  Synthetic
tatgaaccactaaggcgtccaccttgttggcctcacagctccaagaaccgtttaagagctaagctgcgtaaagtctgctggtga

SEQ ID NO: 3431 - DNA, 84 bp, Artificial Sequence
  Synthetic
tatgaaccactaaggcgtccaccttgttgggggagtaagccactgccgggtttaagagctaagctgcgtaaagtctgctggtga

SEQ ID NO: 3432 - DNA, 84 bp, Artificial Sequence
  Synthetic
tatgaaccactaaggcgtccaccttgttggaggccttacgtgcctagaggtttaagagctaagctgcgtaaagtctgctggtga

SEQ ID NO: 3433 - DNA, 84 bp, Artificial Sequence
  Synthetic
tatgaaccactaaggcgtccaccttgttggcgcgggcgcggaagacggggtttaagagctaagctgcgtaaagtctgctggtga

SEQ ID NO: 3434 - DNA, 84 bp, Artificial Sequence
  Synthetic
tatgaaccactaaggcgtccaccttgttgggcgcccgcgcagaacctcggtttaagagctaagctgcgtaaagtctgctggtga

SEQ ID NO: 3435 - DNA, 84 bp, Artificial Sequence
  Synthetic
tatgaaccactaaggcgtccaccttgttggccatgggagccgtgactgagtttaagagctaagctgcgtaaagtctgctggtga

SEQ ID NO: 3436 - DNA, 84 bp, Artificial Sequence
  Synthetic
tatgaaccactaaggcgtccaccttgttggcgcaagctgaggcggcggtgtttaagagctaagctgcgtaaagtctgctggtga

SEQ ID NO: 3437 - DNA, 84 bp, Artificial Sequence
  Synthetic
tatgaaccactaaggcgtccaccttgttgggcggcggcgcaagctgagggtttaagagctaagctgcgtaaagtctgctggtga

SEQ ID NO: 3438 - DNA, 84 bp, Artificial Sequence
  Synthetic
tatgaaccactaaggcgtccaccttgttggaacggagcccgctcagaaggtttaagagctaagctgcgtaaagtctgctggtga

SEQ ID NO: 3439 - DNA, 84 bp, Artificial Sequence
  Synthetic
tatgaaccactaaggcgtccaccttgttggcgctgggcgcgctgtgggggtttaagagctaagctgcgtaaagtctgctggtga

SEQ ID NO: 3440 - DNA, 84 bp, Artificial Sequence
  Synthetic
tatgaaccactaaggcgtccaccttgttgggctgcagctgcgatctctggtttaagagctaagctgcgtaaagtctgctggtga

SEQ ID NO: 3441 - DNA, 84 bp, Artificial Sequence
  Synthetic
tatgaaccactaaggcgtccaccttgttggaacgcggcgcgggagactagtttaagagctaagctgcgtaaagtctgctggtga

SEQ ID NO: 3442 - DNA, 84 bp, Artificial Sequence
  Synthetic
tatgaaccactaaggcgtccaccttgttggagaagcccggaggagccacgtttaagagctaagctgcgtaaagtctgctggtga

SEQ ID NO: 3443 - DNA, 84 bp, Artificial Sequence
  Synthetic
tatgaaccactaaggcgtccaccttgttggccggtgagacccgggaacggtttaagagctaagctgcgtaaagtctgctggtga

SEQ ID NO: 3444 - DNA, 84 bp, Artificial Sequence
  Synthetic
tatgaaccactaaggcgtccaccttgttggcacctcacgcagaaaacacgtttaagagctaagctgcgtaaagtctgctggtga

SEQ ID NO: 3445 - DNA, 84 bp, Artificial Sequence
  Synthetic
tatgaaccactaaggcgtccaccttgttgggcgatactcgggaactcctgtttaagagctaagctgcgtaaagtctgctggtga

SEQ ID NO: 3446 - DNA, 84 bp, Artificial Sequence
  Synthetic
tatgaaccactaaggcgtccaccttgttggggaactcctggggcgagaagtttaagagctaagctgcgtaaagtctgctggtga

SEQ ID NO: 3447 - DNA, 84 bp, Artificial Sequence
  Synthetic
tatgaaccactaaggcgtccaccttgttggctcggatcgccgcgggatcgtttaagagctaagctgcgtaaagtctgctggtga

SEQ ID NO: 3448 - DNA, 84 bp, Artificial Sequence
  Synthetic
tatgaaccactaaggcgtccaccttgttgggcttcgccgtaagttcctcgtttaagagctaagctgcgtaaagtctgctggtga

SEQ ID NO: 3449 - DNA, 84 bp, Artificial Sequence
  Synthetic
tatgaaccactaaggcgtccaccttgttggggggtccccgaggaacttagtttaagagctaagctgcgtaaagtctgctggtga

SEQ ID NO: 3450 - DNA, 84 bp, Artificial Sequence
  Synthetic
tatgaaccactaaggcgtccaccttgttggacgctgcctgactgccggggtttaagagctaagctgcgtaaagtctgctggtga

SEQ ID NO: 3451 - DNA, 84 bp, Artificial Sequence
  Synthetic
tatgaaccactaaggcgtccaccttgttggaggtggtccccactcatgtgtttaagagctaagctgcgtaaagtctgctggtga

SEQ ID NO: 3452 - DNA, 84 bp, Artificial Sequence
  Synthetic
tatgaaccactaaggcgtccaccttgttggtcaggcagcgtcgccgccggtttaagagctaagctgcgtaaagtctgctggtga

SEQ ID NO: 3453 - DNA, 84 bp, Artificial Sequence
  Synthetic
tatgaaccactaaggcgtccaccttgttggacgcgcgtctgtggagaaggtttaagagctaagctgcgtaaagtctgctggtga

SEQ ID NO: 3454 - DNA, 84 bp, Artificial Sequence
  Synthetic
tatgaaccactaaggcgtccaccttgttggggagaagcggcttggtcgggtttaagagctaagctgcgtaaagtctgctggtga

SEQ ID NO: 3455 - DNA, 84 bp, Artificial Sequence
  Synthetic
tatgaaccactaaggcgtccaccttgttggggcggccagagagatgcccgtttaagagctaagctgcgtaaagtctgctggtga

SEQ ID NO: 3456 - DNA, 84 bp, Artificial Sequence
  Synthetic
tatgaaccactaaggcgtccaccttgttggagggaggtgaccgtggcgggtttaagagctaagctgcgtaaagtctgctggtga

SEQ ID NO: 3457 - DNA, 84 bp, Artificial Sequence
  Synthetic
tatgaaccactaaggcgtccaccttgttggggtgttatgccggacaagagtttaagagctaagctgcgtaaagtctgctggtga

SEQ ID NO: 3458 - DNA, 84 bp, Artificial Sequence
  Synthetic
tatgaaccactaaggcgtccaccttgttggtttgcacaccggggagagagtttaagagctaagctgcgtaaagtctgctggtga

SEQ ID NO: 3459 - DNA, 84 bp, Artificial Sequence
  Synthetic
tatgaaccactaaggcgtccaccttgttggaagttccacgccaagatacgtttaagagctaagctgcgtaaagtctgctggtga

SEQ ID NO: 3460 - DNA, 84 bp, Artificial Sequence
  Synthetic
tatgaaccactaaggcgtccaccttgttggactggattcggtgctgagggtttaagagctaagctgcgtaaagtctgctggtga

SEQ ID NO: 3461 - DNA, 84 bp, Artificial Sequence
  Synthetic
tatgaaccactaaggcgtccaccttgttggtcagtgactgaagctccaagtttaagagctaagctgcgtaaagtctgctggtga

SEQ ID NO: 3462 - DNA, 84 bp, Artificial Sequence
  Synthetic
tatgaaccactaaggcgtccaccttgttggcgcaccgcggatccagctcgtttaagagctaagctgcgtaaagtctgctggtga

SEQ ID NO: 3463 - DNA, 84 bp, Artificial Sequence
  Synthetic
tatgaaccactaaggcgtccaccttgttggcggctggacccggaaataggtttaagagctaagctgcgtaaagtctgctggtga

SEQ ID NO: 3464 - DNA, 84 bp, Artificial Sequence
  Synthetic
tatgaaccactaaggcgtccaccttgttggggtagccgccccgggaacagtttaagagctaagctgcgtaaagtctgctggtga

SEQ ID NO: 3465 - DNA, 84 bp, Artificial Sequence
  Synthetic
tatgaaccactaaggcgtccaccttgttggggcatcgcgaaccccagttgtttaagagctaagctgcgtaaagtctgctggtga

SEQ ID NO: 3466 - DNA, 84 bp, Artificial Sequence
  Synthetic
tatgaaccactaaggcgtccaccttgttggggctccaacgaggtaagtggtttaagagctaagctgcgtaaagtctgctggtga

SEQ ID NO: 3467 - DNA, 84 bp, Artificial Sequence
  Synthetic
tatgaaccactaaggcgtccaccttgttggtctccgggcggcgagtcgggtttaagagctaagctgcgtaaagtctgctggtga

SEQ ID NO: 3468 - DNA, 84 bp, Artificial Sequence
  Synthetic
tatgaaccactaaggcgtccaccttgttggaagaggcggagtcgaggtggtttaagagctaagctgcgtaaagtctgctggtga

SEQ ID NO: 3469 - DNA, 84 bp, Artificial Sequence
  Synthetic
tatgaaccactaaggcgtccaccttgttggcgcctgggaggttactgtagtttaagagctaagctgcgtaaagtctgctggtga

SEQ ID NO: 3470 - DNA, 84 bp, Artificial Sequence
  Synthetic
tatgaaccactaaggcgtccaccttgttggcgtatcctccaggaagagggtttaagagctaagctgcgtaaagtctgctggtga

SEQ ID NO: 3471 - DNA, 84 bp, Artificial Sequence
  Synthetic
tatgaaccactaaggcgtccaccttgttggagtctagagccaccgtccagtttaagagctaagctgcgtaaagtctgctggtga

SEQ ID NO: 3472 - DNA, 84 bp, Artificial Sequence
  Synthetic
tatgaaccactaaggcgtccaccttgttggcagggagcaggtagctgctgtttaagagctaagctgcgtaaagtctgctggtga

SEQ ID NO: 3473 - DNA, 84 bp, Artificial Sequence
  Synthetic
tatgaaccactaaggcgtccaccttgttgggagccaccgtccagggagcgtttaagagctaagctgcgtaaagtctgctggtga

SEQ ID NO: 3474 - DNA, 84 bp, Artificial Sequence
  Synthetic
tatgaaccactaaggcgtccaccttgttggacctagggatcgatctggagtttaagagctaagctgcgtaaagtctgctggtga

SEQ ID NO: 3475 - DNA, 84 bp, Artificial Sequence
  Synthetic
tatgaaccactaaggcgtccaccttgttggggcgacctagggatcgatcgtttaagagctaagctgcgtaaagtctgctggtga

SEQ ID NO: 3476 - DNA, 84 bp, Artificial Sequence
  Synthetic
tatgaaccactaaggcgtccaccttgttggtggcgacagcggcgacctagtttaagagctaagctgcgtaaagtctgctggtga

SEQ ID NO: 3477 - DNA, 84 bp, Artificial Sequence
  Synthetic
tatgaaccactaaggcgtccaccttgttggagccttccagagcactcccgtttaagagctaagctgcgtaaagtctgctggtga

SEQ ID NO: 3478 - DNA, 84 bp, Artificial Sequence
  Synthetic
tatgaaccactaaggcgtccaccttgttggaggctgcgcagtattggaggtttaagagctaagctgcgtaaagtctgctggtga

SEQ ID NO: 3479 - DNA, 84 bp, Artificial Sequence
  Synthetic
tatgaaccactaaggcgtccaccttgttggtgcccgaggtctccatcctgtttaagagctaagctgcgtaaagtctgctggtga

SEQ ID NO: 3480 - DNA, 84 bp, Artificial Sequence
  Synthetic
tatgaaccactaaggcgtccaccttgttggccggccgggccccctgacggtttaagagctaagctgcgtaaagtctgctggtga

SEQ ID NO: 3481 - DNA, 84 bp, Artificial Sequence
  Synthetic
tatgaaccactaaggcgtccaccttgttggggattagttggtttcggaggtttaagagctaagctgcgtaaagtctgctggtga

SEQ ID NO: 3482 - DNA, 84 bp, Artificial Sequence
  Synthetic
tatgaaccactaaggcgtccaccttgttgggtctcttcgacgctcgtgagtttaagagctaagctgcgtaaagtctgctggtga

SEQ ID NO: 3483 - DNA, 84 bp, Artificial Sequence
  Synthetic
tatgaaccactaaggcgtccaccttgttgggccctgggccggagaacccgtttaagagctaagctgcgtaaagtctgctggtga

SEQ ID NO: 3484 - DNA, 84 bp, Artificial Sequence
  Synthetic
tatgaaccactaaggcgtccaccttgttgggcttgtgcgcggaaccgaggtttaagagctaagctgcgtaaagtctgctggtga

SEQ ID NO: 3485 - DNA, 84 bp, Artificial Sequence
  Synthetic
tatgaaccactaaggcgtccaccttgttggggtaagccccggccgcgcagtttaagagctaagctgcgtaaagtctgctggtga

SEQ ID NO: 3486 - DNA, 84 bp, Artificial Sequence
  Synthetic
tatgaaccactaaggcgtccaccttgttggcaggcaggcagtagtgactgtttaagagctaagctgcgtaaagtctgctggtga

SEQ ID NO: 3487 - DNA, 84 bp, Artificial Sequence
  Synthetic
tatgaaccactaaggcgtccaccttgttggctcaccgtagcaggcaggcgtttaagagctaagctgcgtaaagtctgctggtga

SEQ ID NO: 3488 - DNA, 84 bp, Artificial Sequence
  Synthetic
tatgaaccactaaggcgtccaccttgttggtcggctgcacactctcccggtttaagagctaagctgcgtaaagtctgctggtga

SEQ ID NO: 3489 - DNA, 84 bp, Artificial Sequence
  Synthetic
tatgaaccactaaggcgtccaccttgttggcggctcggagcgcgaaacagtttaagagctaagctgcgtaaagtctgctggtga

SEQ ID NO: 3490 - DNA, 84 bp, Artificial Sequence
  Synthetic
tatgaaccactaaggcgtccaccttgttggggcggcgacgactactcaggtttaagagctaagctgcgtaaagtctgctggtga

SEQ ID NO: 3491 - DNA, 84 bp, Artificial Sequence
  Synthetic
tatgaaccactaaggcgtccaccttgttgggcgcagccggaaccggcgagtttaagagctaagctgcgtaaagtctgctggtga

SEQ ID NO: 3492 - DNA, 84 bp, Artificial Sequence
  Synthetic
tatgaaccactaaggcgtccaccttgttggcggccgagcggttgcgacggtttaagagctaagctgcgtaaagtctgctggtga

SEQ ID NO: 3493 - DNA, 84 bp, Artificial Sequence
  Synthetic
tatgaaccactaaggcgtccaccttgttgggcaggccgcacccacttgggtttaagagctaagctgcgtaaagtctgctggtga

SEQ ID NO: 3494 - DNA, 84 bp, Artificial Sequence
  Synthetic
tatgaaccactaaggcgtccaccttgttggtgcgacgagggctcggctggtttaagagctaagctgcgtaaagtctgctggtga

SEQ ID NO: 3495 - DNA, 84 bp, Artificial Sequence
  Synthetic
tatgaaccactaaggcgtccaccttgttgggcgggacaaccacgagccggtttaagagctaagctgcgtaaagtctgctggtga

SEQ ID NO: 3496 - DNA, 84 bp, Artificial Sequence
  Synthetic
tatgaaccactaaggcgtccaccttgttggggacaaccacgagccgcgggtttaagagctaagctgcgtaaagtctgctggtga

SEQ ID NO: 3497 - DNA, 84 bp, Artificial Sequence
  Synthetic
tatgaaccactaaggcgtccaccttgttggtcccgccatggcactgtcggtttaagagctaagctgcgtaaagtctgctggtga

SEQ ID NO: 3498 - DNA, 84 bp, Artificial Sequence
  Synthetic
tatgaaccactaaggcgtccaccttgttggccgaccctcgacttcggaggtttaagagctaagctgcgtaaagtctgctggtga

SEQ ID NO: 3499 - DNA, 84 bp, Artificial Sequence
  Synthetic
tatgaaccactaaggcgtccaccttgttgggaggcagcgcggttcctctgtttaagagctaagctgcgtaaagtctgctggtga

SEQ ID NO: 3500 - DNA, 84 bp, Artificial Sequence
  Synthetic
tatgaaccactaaggcgtccaccttgttgggggaggcggaagcacccaggtttaagagctaagctgcgtaaagtctgctggtga

SEQ ID NO: 3501 - DNA, 84 bp, Artificial Sequence
  Synthetic
tatgaaccactaaggcgtccaccttgttgggagcatgtcgaccccggccgtttaagagctaagctgcgtaaagtctgctggtga

SEQ ID NO: 3502 - DNA, 84 bp, Artificial Sequence
  Synthetic
tatgaaccactaaggcgtccaccttgttgggcccggaggaggctcatgcgtttaagagctaagctgcgtaaagtctgctggtga

SEQ ID NO: 3503 - DNA, 84 bp, Artificial Sequence
  Synthetic
tatgaaccactaaggcgtccaccttgttggggaaccgcgccccgctgaagtttaagagctaagctgcgtaaagtctgctggtga

SEQ ID NO: 3504 - DNA, 84 bp, Artificial Sequence
  Synthetic
tatgaaccactaaggcgtccaccttgttggagggaagtcccgagacaaagtttaagagctaagctgcgtaaagtctgctggtga

SEQ ID NO: 3505 - DNA, 84 bp, Artificial Sequence
  Synthetic
tatgaaccactaaggcgtccaccttgttgggagcgtagcggacaggtgggtttaagagctaagctgcgtaaagtctgctggtga

SEQ ID NO: 3506 - DNA, 84 bp, Artificial Sequence
  Synthetic
tatgaaccactaaggcgtccaccttgttggggacaggtggaggaccgaggtttaagagctaagctgcgtaaagtctgctggtga

SEQ ID NO: 3507 - DNA, 84 bp, Artificial Sequence
  Synthetic
tatgaaccactaaggcgtccaccttgttggacgcacgagtggaagtcccgtttaagagctaagctgcgtaaagtctgctggtga

SEQ ID NO: 3508 - DNA, 84 bp, Artificial Sequence
  Synthetic
tatgaaccactaaggcgtccaccttgttggcctgcccgcgacggtggtagtttaagagctaagctgcgtaaagtctgctggtga

SEQ ID NO: 3509 - DNA, 84 bp, Artificial Sequence
  Synthetic
tatgaaccactaaggcgtccaccttgttggtgcgtgaggcgagaggagcgtttaagagctaagctgcgtaaagtctgctggtga

SEQ ID NO: 3510 - DNA, 84 bp, Artificial Sequence
  Synthetic
tatgaaccactaaggcgtccaccttgttggagcaacgcgcggaccaacggtttaagagctaagctgcgtaaagtctgctggtga

SEQ ID NO: 3511 - DNA, 84 bp, Artificial Sequence
  Synthetic
tatgaaccactaaggcgtccaccttgttggcaacagtcagaggtcgcgcgtttaagagctaagctgcgtaaagtctgctggtga

SEQ ID NO: 3512 - DNA, 84 bp, Artificial Sequence
  Synthetic
tatgaaccactaaggcgtccaccttgttgggagaccctccgctcaacaggtttaagagctaagctgcgtaaagtctgctggtga

SEQ ID NO: 3513 - DNA, 84 bp, Artificial Sequence
  Synthetic
tatgaaccactaaggcgtccaccttgttggaaatcacgcagcccggcccgtttaagagctaagctgcgtaaagtctgctggtga

SEQ ID NO: 3514 - DNA, 84 bp, Artificial Sequence
  Synthetic
tatgaaccactaaggcgtccaccttgttggcggcccgggaaccgacctggtttaagagctaagctgcgtaaagtctgctggtga

SEQ ID NO: 3515 - DNA, 84 bp, Artificial Sequence
  Synthetic
tatgaaccactaaggcgtccaccttgttgggatggcggtctccacaggtgtttaagagctaagctgcgtaaagtctgctggtga

SEQ ID NO: 3516 - DNA, 84 bp, Artificial Sequence
  Synthetic
tatgaaccactaaggcgtccaccttgttggaagcgcccgcggtctgagggtttaagagctaagctgcgtaaagtctgctggtga

SEQ ID NO: 3517 - DNA, 84 bp, Artificial Sequence
  Synthetic
tatgaaccactaaggcgtccaccttgttgggtcacgagccgaagggagggtttaagagctaagctgcgtaaagtctgctggtga

SEQ ID NO: 3518 - DNA, 84 bp, Artificial Sequence
  Synthetic
tatgaaccactaaggcgtccaccttgttgggttgtcacgagccgaaggggtttaagagctaagctgcgtaaagtctgctggtga

SEQ ID NO: 3519 - DNA, 84 bp, Artificial Sequence
  Synthetic
tatgaaccactaaggcgtccaccttgttggccggcggcagctggtgcgggtttaagagctaagctgcgtaaagtctgctggtga

SEQ ID NO: 3520 - DNA, 84 bp, Artificial Sequence
  Synthetic
tatgaaccactaaggcgtccaccttgttgggacgtgtggttgacgagctgtttaagagctaagctgcgtaaagtctgctggtga

SEQ ID NO: 3521 - DNA, 84 bp, Artificial Sequence
  Synthetic
tatgaaccactaaggcgtccaccttgttgggtgtggttgacgagctcgggtttaagagctaagctgcgtaaagtctgctggtga

SEQ ID NO: 3522 - DNA, 84 bp, Artificial Sequence
  Synthetic
tatgaaccactaaggcgtccaccttgttggaaaccccacccgagatccggtttaagagctaagctgcgtaaagtctgctggtga

SEQ ID NO: 3523 - DNA, 84 bp, Artificial Sequence
  Synthetic
tatgaaccactaaggcgtccaccttgttggcccgccgccgggactacaggtttaagagctaagctgcgtaaagtctgctggtga

SEQ ID NO: 3524 - DNA, 84 bp, Artificial Sequence
  Synthetic
tatgaaccactaaggcgtccaccttgttgggtgctgcggagccaataaggtttaagagctaagctgcgtaaagtctgctggtga

SEQ ID NO: 3525 - DNA, 84 bp, Artificial Sequence
  Synthetic
tatgaaccactaaggcgtccaccttgttggccacacgttgggagcgcgggtttaagagctaagctgcgtaaagtctgctggtga

SEQ ID NO: 3526 - DNA, 84 bp, Artificial Sequence
  Synthetic
tatgaaccactaaggcgtccaccttgttggcgtcgcgagagacacacccgtttaagagctaagctgcgtaaagtctgctggtga

SEQ ID NO: 3527 - DNA, 84 bp, Artificial Sequence
  Synthetic
tatgaaccactaaggcgtccaccttgttggcgtcgggagaggcctacctgtttaagagctaagctgcgtaaagtctgctggtga

SEQ ID NO: 3528 - DNA, 84 bp, Artificial Sequence
  Synthetic
tatgaaccactaaggcgtccaccttgttggccccgagccggccgtccaggtttaagagctaagctgcgtaaagtctgctggtga

SEQ ID NO: 3529 - DNA, 84 bp, Artificial Sequence
  Synthetic
tatgaaccactaaggcgtccaccttgttggcgccacccgggaaccggcggtttaagagctaagctgcgtaaagtctgctggtga

SEQ ID NO: 3530 - DNA, 84 bp, Artificial Sequence
  Synthetic
tatgaaccactaaggcgtccaccttgttgggtcgcttcctggcggggctgtttaagagctaagctgcgtaaagtctgctggtga

SEQ ID NO: 3531 - DNA, 84 bp, Artificial Sequence
  Synthetic
tatgaaccactaaggcgtccaccttgttgggagcggctggcggcttcgagtttaagagctaagctgcgtaaagtctgctggtga

SEQ ID NO: 3532 - DNA, 84 bp, Artificial Sequence
  Synthetic
tatgaaccactaaggcgtccaccttgttgggcccgagggccctacccgggtttaagagctaagctgcgtaaagtctgctggtga

SEQ ID NO: 3533 - DNA, 84 bp, Artificial Sequence
  Synthetic
tatgaaccactaaggcgtccaccttgttggttcgaggggagctgaggcggtttaagagctaagctgcgtaaagtctgctggtga

SEQ ID NO: 3534 - DNA, 84 bp, Artificial Sequence
  Synthetic
tatgaaccactaaggcgtccaccttgttggccaggagcgcaacaagcaggtttaagagctaagctgcgtaaagtctgctggtga

SEQ ID NO: 3535 - DNA, 84 bp, Artificial Sequence
  Synthetic
tatgaaccactaaggcgtccaccttgttggccgaacgcctgaaccgctagtttaagagctaagctgcgtaaagtctgctggtga

SEQ ID NO: 3536 - DNA, 84 bp, Artificial Sequence
  Synthetic
tatgaaccactaaggcgtccaccttgttggcgcgccaagttcccctcgggtttaagagctaagctgcgtaaagtctgctggtga

SEQ ID NO: 3537 - DNA, 84 bp, Artificial Sequence
  Synthetic
tatgaaccactaaggcgtccaccttgttggaccccctgtcccgcccggcgtttaagagctaagctgcgtaaagtctgctggtga

SEQ ID NO: 3538 - DNA, 84 bp, Artificial Sequence
  Synthetic
tatgaaccactaaggcgtccaccttgttgggagaccggtgacccgcggcgtttaagagctaagctgcgtaaagtctgctggtga

SEQ ID NO: 3539 - DNA, 84 bp, Artificial Sequence
  Synthetic
tatgaaccactaaggcgtccaccttgttgggcgggagaccggtgacccggtttaagagctaagctgcgtaaagtctgctggtga

SEQ ID NO: 3540 - DNA, 84 bp, Artificial Sequence
  Synthetic
tatgaaccactaaggcgtccaccttgttggaatgtcacatccgcatggggtttaagagctaagctgcgtaaagtctgctggtga

SEQ ID NO: 3541 - DNA, 84 bp, Artificial Sequence
  Synthetic
tatgaaccactaaggcgtccaccttgttggagcgaggagagcaagcggggtttaagagctaagctgcgtaaagtctgctggtga

SEQ ID NO: 3542 - DNA, 84 bp, Artificial Sequence
  Synthetic
tatgaaccactaaggcgtccaccttgttggctcctcggcgtcgtcgtcggtttaagagctaagctgcgtaaagtctgctggtga

SEQ ID NO: 3543 - DNA, 84 bp, Artificial Sequence
  Synthetic
tatgaaccactaaggcgtccaccttgttggagagccccggggaccgaacgtttaagagctaagctgcgtaaagtctgctggtga

SEQ ID NO: 3544 - DNA, 84 bp, Artificial Sequence
  Synthetic
tatgaaccactaaggcgtccaccttgttgggccgcgtcagcggtaggtggtttaagagctaagctgcgtaaagtctgctggtga

SEQ ID NO: 3545 - DNA, 84 bp, Artificial Sequence
  Synthetic
tatgaaccactaaggcgtccaccttgttggtggttacgctgccgggcgggtttaagagctaagctgcgtaaagtctgctggtga

SEQ ID NO: 3546 - DNA, 84 bp, Artificial Sequence
  Synthetic
tatgaaccactaaggcgtccaccttgttggccaaaaccgagctggtgaggtttaagagctaagctgcgtaaagtctgctggtga

SEQ ID NO: 3547 - DNA, 84 bp, Artificial Sequence
  Synthetic
tatgaaccactaaggcgtccaccttgttggccccggacaaagaagaagagtttaagagctaagctgcgtaaagtctgctggtga

SEQ ID NO: 3548 - DNA, 84 bp, Artificial Sequence
  Synthetic
tatgaaccactaaggcgtccaccttgttgggtggcggcgcagtctcggtgtttaagagctaagctgcgtaaagtctgctggtga

SEQ ID NO: 3549 - DNA, 84 bp, Artificial Sequence
  Synthetic
tatgaaccactaaggcgtccaccttgttggactgtgggaagcggagtgagtttaagagctaagctgcgtaaagtctgctggtga

SEQ ID NO: 3550 - DNA, 84 bp, Artificial Sequence
  Synthetic
tatgaaccactaaggcgtccaccttgttggagcggagtgacggagcgaggtttaagagctaagctgcgtaaagtctgctggtga

SEQ ID NO: 3551 - DNA, 84 bp, Artificial Sequence
  Synthetic
tatgaaccactaaggcgtccaccttgttggtgagagccgagagaggcgagtttaagagctaagctgcgtaaagtctgctggtga

SEQ ID NO: 3552 - DNA, 84 bp, Artificial Sequence
  Synthetic
tatgaaccactaaggcgtccaccttgttggcggggcggcccgagcaccggtttaagagctaagctgcgtaaagtctgctggtga

SEQ ID NO: 3553 - DNA, 84 bp, Artificial Sequence
  Synthetic
tatgaaccactaaggcgtccaccttgttggctcgggctgcggacggtgggtttaagagctaagctgcgtaaagtctgctggtga

SEQ ID NO: 3554 - DNA, 84 bp, Artificial Sequence
  Synthetic
tatgaaccactaaggcgtccaccttgttggctttccggcagaggcgggggtttaagagctaagctgcgtaaagtctgctggtga

SEQ ID NO: 3555 - DNA, 84 bp, Artificial Sequence
  Synthetic
tatgaaccactaaggcgtccaccttgttggctgtgggaggcctgagggggtttaagagctaagctgcgtaaagtctgctggtga

SEQ ID NO: 3556 - DNA, 84 bp, Artificial Sequence
  Synthetic
tatgaaccactaaggcgtccaccttgttgggcgcgcgagagcctcggccgtttaagagctaagctgcgtaaagtctgctggtga

SEQ ID NO: 3557 - DNA, 84 bp, Artificial Sequence
  Synthetic
tatgaaccactaaggcgtccaccttgttggggcgggcggctctccggaggtttaagagctaagctgcgtaaagtctgctggtga

SEQ ID NO: 3558 - DNA, 84 bp, Artificial Sequence
  Synthetic
tatgaaccactaaggcgtccaccttgttgggcctgggtagcacggtcctgtttaagagctaagctgcgtaaagtctgctggtga

SEQ ID NO: 3559 - DNA, 84 bp, Artificial Sequence
  Synthetic
tatgaaccactaaggcgtccaccttgttggggccgagggggctgtgcacgtttaagagctaagctgcgtaaagtctgctggtga

SEQ ID NO: 3560 - DNA, 84 bp, Artificial Sequence
  Synthetic
tatgaaccactaaggcgtccaccttgttggtcctcagtgccggccgccagtttaagagctaagctgcgtaaagtctgctggtga

SEQ ID NO: 3561 - DNA, 84 bp, Artificial Sequence
  Synthetic
tatgaaccactaaggcgtccaccttgttggcgcgctgccgagtacaagcgtttaagagctaagctgcgtaaagtctgctggtga

SEQ ID NO: 3562 - DNA, 84 bp, Artificial Sequence
  Synthetic
tatgaaccactaaggcgtccaccttgttggggaggcgccggcttgtactgtttaagagctaagctgcgtaaagtctgctggtga

SEQ ID NO: 3563 - DNA, 84 bp, Artificial Sequence
  Synthetic
tatgaaccactaaggcgtccaccttgttggtagcactatagataccccggtttaagagctaagctgcgtaaagtctgctggtga

SEQ ID NO: 3564 - DNA, 84 bp, Artificial Sequence
  Synthetic
tatgaaccactaaggcgtccaccttgttgggacatgacgatccggtctcgtttaagagctaagctgcgtaaagtctgctggtga

SEQ ID NO: 3565 - DNA, 84 bp, Artificial Sequence
  Synthetic
tatgaaccactaaggcgtccaccttgttgggactcacgaagacaaggtcgtttaagagctaagctgcgtaaagtctgctggtga

SEQ ID NO: 3566 - DNA, 84 bp, Artificial Sequence
  Synthetic
tatgaaccactaaggcgtccaccttgttggtccggtctctggcccattagtttaagagctaagctgcgtaaagtctgctggtga

SEQ ID NO: 3567 - DNA, 84 bp, Artificial Sequence
  Synthetic
tatgaaccactaaggcgtccaccttgttggagtgggccagagatggcgggtttaagagctaagctgcgtaaagtctgctggtga

SEQ ID NO: 3568 - DNA, 84 bp, Artificial Sequence
  Synthetic
tatgaaccactaaggcgtccaccttgttggcctcggagtgggccagagagtttaagagctaagctgcgtaaagtctgctggtga

SEQ ID NO: 3569 - DNA, 84 bp, Artificial Sequence
  Synthetic
tatgaaccactaaggcgtccaccttgttggggagctaggtcctcggagtgtttaagagctaagctgcgtaaagtctgctggtga

SEQ ID NO: 3570 - DNA, 84 bp, Artificial Sequence
  Synthetic
tatgaaccactaaggcgtccaccttgttggcagggcgggagtccagacggtttaagagctaagctgcgtaaagtctgctggtga

SEQ ID NO: 3571 - DNA, 84 bp, Artificial Sequence
  Synthetic
tatgaaccactaaggcgtccaccttgttggccagacaagcaacatggctgtttaagagctaagctgcgtaaagtctgctggtga

SEQ ID NO: 3572 - DNA, 84 bp, Artificial Sequence
  Synthetic
tatgaaccactaaggcgtccaccttgttggtgcgcagttcgcgtccccggtttaagagctaagctgcgtaaagtctgctggtga

SEQ ID NO: 3573 - DNA, 84 bp, Artificial Sequence
  Synthetic
tatgaaccactaaggcgtccaccttgttggctgtgtaaagaccacaggagtttaagagctaagctgcgtaaagtctgctggtga

SEQ ID NO: 3574 - DNA, 84 bp, Artificial Sequence
  Synthetic
tatgaaccactaaggcgtccaccttgttgggtccctgtgtaaagaccacgtttaagagctaagctgcgtaaagtctgctggtga

SEQ ID NO: 3575 - DNA, 84 bp, Artificial Sequence
  Synthetic
tatgaaccactaaggcgtccaccttgttggttagcttgaatggaacactgtttaagagctaagctgcgtaaagtctgctggtga

SEQ ID NO: 3576 - DNA, 84 bp, Artificial Sequence
  Synthetic
tatgaaccactaaggcgtccaccttgttgggctgctgcaggacacgacagtttaagagctaagctgcgtaaagtctgctggtga

SEQ ID NO: 3577 - DNA, 84 bp, Artificial Sequence
  Synthetic
tatgaaccactaaggcgtccaccttgttgggtagagtatggggtccgaggtttaagagctaagctgcgtaaagtctgctggtga

SEQ ID NO: 3578 - DNA, 84 bp, Artificial Sequence
  Synthetic
tatgaaccactaaggcgtccaccttgttggttcttccagacaccaatccgtttaagagctaagctgcgtaaagtctgctggtga

SEQ ID NO: 3579 - DNA, 84 bp, Artificial Sequence
  Synthetic
tatgaaccactaaggcgtccaccttgttggagtctgcgcagttggtgaagtttaagagctaagctgcgtaaagtctgctggtga

SEQ ID NO: 3580 - DNA, 84 bp, Artificial Sequence
  Synthetic
tatgaaccactaaggcgtccaccttgttgggatgtgtagtgccttccatgtttaagagctaagctgcgtaaagtctgctggtga

SEQ ID NO: 3581 - DNA, 84 bp, Artificial Sequence
  Synthetic
tatgaaccactaaggcgtccaccttgttgggcactacacatcgccccgagtttaagagctaagctgcgtaaagtctgctggtga

SEQ ID NO: 3582 - DNA, 84 bp, Artificial Sequence
  Synthetic
tatgaaccactaaggcgtccaccttgttgggccgagaggagcaggacgggtttaagagctaagctgcgtaaagtctgctggtga

SEQ ID NO: 3583 - DNA, 84 bp, Artificial Sequence
  Synthetic
tatgaaccactaaggcgtccaccttgttgggcggaacccgcgggaggtggtttaagagctaagctgcgtaaagtctgctggtga

SEQ ID NO: 3584 - DNA, 84 bp, Artificial Sequence
  Synthetic
tatgaaccactaaggcgtccaccttgttggggagtgcggaacccgcggggtttaagagctaagctgcgtaaagtctgctggtga

SEQ ID NO: 3585 - DNA, 84 bp, Artificial Sequence
  Synthetic
tatgaaccactaaggcgtccaccttgttggcggaagtagagtcacggaggtttaagagctaagctgcgtaaagtctgctggtga

SEQ ID NO: 3586 - DNA, 84 bp, Artificial Sequence
  Synthetic
tatgaaccactaaggcgtccaccttgttgggaggtaggatccggaagtggtttaagagctaagctgcgtaaagtctgctggtga

SEQ ID NO: 3587 - DNA, 84 bp, Artificial Sequence
  Synthetic
tatgaaccactaaggcgtccaccttgttgggataccggaagtagagtcagtttaagagctaagctgcgtaaagtctgctggtga

SEQ ID NO: 3588 - DNA, 84 bp, Artificial Sequence
  Synthetic
tatgaaccactaaggcgtccaccttgttggcaccatgttgccggtcctcgtttaagagctaagctgcgtaaagtctgctggtga

SEQ ID NO: 3589 - DNA, 84 bp, Artificial Sequence
  Synthetic
tatgaaccactaaggcgtccaccttgttggcgctttggtcgcttcttccgtttaagagctaagctgcgtaaagtctgctggtga

SEQ ID NO: 3590 - DNA, 84 bp, Artificial Sequence
  Synthetic
tatgaaccactaaggcgtccaccttgttgggaccaaagcgcctgaggacgtttaagagctaagctgcgtaaagtctgctggtga

SEQ ID NO: 3591 - DNA, 84 bp, Artificial Sequence
  Synthetic
tatgaaccactaaggcgtccaccttgttggataacggcccgcttaccttgtttaagagctaagctgcgtaaagtctgctggtga

SEQ ID NO: 3592 - DNA, 84 bp, Artificial Sequence
  Synthetic
tatgaaccactaaggcgtccaccttgttggcccgcttacctttggcgcagtttaagagctaagctgcgtaaagtctgctggtga

SEQ ID NO: 3593 - DNA, 84 bp, Artificial Sequence
  Synthetic
tatgaaccactaaggcgtccaccttgttggtccctgcgccaaaggtaaggtttaagagctaagctgcgtaaagtctgctggtga

SEQ ID NO: 3594 - DNA, 84 bp, Artificial Sequence
  Synthetic
tatgaaccactaaggcgtccaccttgttgggcaccggcccgggagggaagtttaagagctaagctgcgtaaagtctgctggtga

SEQ ID NO: 3595 - DNA, 84 bp, Artificial Sequence
  Synthetic
tatgaaccactaaggcgtccaccttgttgggcggcgcaccggcccgggagtttaagagctaagctgcgtaaagtctgctggtga

SEQ ID NO: 3596 - DNA, 84 bp, Artificial Sequence
  Synthetic
tatgaaccactaaggcgtccaccttgttggggctgggcccgccccactagtttaagagctaagctgcgtaaagtctgctggtga

SEQ ID NO: 3597 - DNA, 84 bp, Artificial Sequence
  Synthetic
tatgaaccactaaggcgtccaccttgttgggaaggagggcgagttacttgtttaagagctaagctgcgtaaagtctgctggtga

SEQ ID NO: 3598 - DNA, 84 bp, Artificial Sequence
  Synthetic
tatgaaccactaaggcgtccaccttgttgggagaacgccgcgaaaagaggtttaagagctaagctgcgtaaagtctgctggtga

SEQ ID NO: 3599 - DNA, 84 bp, Artificial Sequence
  Synthetic
tatgaaccactaaggcgtccaccttgttgggagttacttgggctcacgggtttaagagctaagctgcgtaaagtctgctggtga

SEQ ID NO: 3600 - DNA, 84 bp, Artificial Sequence
  Synthetic
tatgaaccactaaggcgtccaccttgttggagggtgtcgcccgaggccagtttaagagctaagctgcgtaaagtctgctggtga

SEQ ID NO: 3601 - DNA, 84 bp, Artificial Sequence
  Synthetic
tatgaaccactaaggcgtccaccttgttgggccgggcccgagcagagtggtttaagagctaagctgcgtaaagtctgctggtga

SEQ ID NO: 3602 - DNA, 84 bp, Artificial Sequence
  Synthetic
tatgaaccactaaggcgtccaccttgttgggcggctgcagagcgatcatgtttaagagctaagctgcgtaaagtctgctggtga

SEQ ID NO: 3603 - DNA, 84 bp, Artificial Sequence
  Synthetic
tatgaaccactaaggcgtccaccttgttggagagtgcgggcggaagacggtttaagagctaagctgcgtaaagtctgctggtga

SEQ ID NO: 3604 - DNA, 84 bp, Artificial Sequence
  Synthetic
tatgaaccactaaggcgtccaccttgttggagttgtgttgtgccaatgggtttaagagctaagctgcgtaaagtctgctggtga

SEQ ID NO: 3605 - DNA, 84 bp, Artificial Sequence
  Synthetic
tatgaaccactaaggcgtccaccttgttgggacagttgtgttgtgccaagtttaagagctaagctgcgtaaagtctgctggtga

SEQ ID NO: 3606 - DNA, 84 bp, Artificial Sequence
  Synthetic
tatgaaccactaaggcgtccaccttgttggacctcaggctccaactcgtgtttaagagctaagctgcgtaaagtctgctggtga

SEQ ID NO: 3607 - DNA, 84 bp, Artificial Sequence
  Synthetic
tatgaaccactaaggcgtccaccttgttggcaccgcgacaagtgaacgggtttaagagctaagctgcgtaaagtctgctggtga

SEQ ID NO: 3608 - DNA, 84 bp, Artificial Sequence
  Synthetic
tatgaaccactaaggcgtccaccttgttgggcgggagttggagattctggtttaagagctaagctgcgtaaagtctgctggtga

SEQ ID NO: 3609 - DNA, 84 bp, Artificial Sequence
  Synthetic
tcaccagcagactttacgcagcttagctcttaaacctttgttgcctgaggtgggccaacaaggtggacgccttagtggttcata

SEQ ID NO: 3610 - DNA, 84 bp, Artificial Sequence
  Synthetic
tcaccagcagactttacgcagcttagctcttaaactagggtaggagtcgcgccgccaacaaggtggacgccttagtggttcata

SEQ ID NO: 3611 - DNA, 84 bp, Artificial Sequence
  Synthetic
tcaccagcagactttacgcagcttagctcttaaacaccctaagggctaactggcccaacaaggtggacgccttagtggttcata

SEQ ID NO: 3612 - DNA, 84 bp, Artificial Sequence
  Synthetic
tcaccagcagactttacgcagcttagctcttaaacgtgccgcaccggacccagtccaacaaggtggacgccttagtggttcata

SEQ ID NO: 3613 - DNA, 84 bp, Artificial Sequence
  Synthetic
tcaccagcagactttacgcagcttagctcttaaacccatcttggagcgcgcgtcccaacaaggtggacgccttagtggttcata

SEQ ID NO: 3614 - DNA, 84 bp, Artificial Sequence
  Synthetic
tcaccagcagactttacgcagcttagctcttaaacgttccgcgacgcccgtgccccaacaaggtggacgccttagtggttcata

SEQ ID NO: 3615 - DNA, 84 bp, Artificial Sequence
  Synthetic
tcaccagcagactttacgcagcttagctcttaaaccagcgctgcagccacgactccaacaaggtggacgccttagtggttcata

SEQ ID NO: 3616 - DNA, 84 bp, Artificial Sequence
  Synthetic
tcaccagcagactttacgcagcttagctcttaaacaccaacctctcgcctcagcccaacaaggtggacgccttagtggttcata

SEQ ID NO: 3617 - DNA, 84 bp, Artificial Sequence
  Synthetic
tcaccagcagactttacgcagcttagctcttaaacgggtcattatggccggagaccaacaaggtggacgccttagtggttcata

SEQ ID NO: 3618 - DNA, 84 bp, Artificial Sequence
  Synthetic
tcaccagcagactttacgcagcttagctcttaaacctttacctgtccatagtggccaacaaggtggacgccttagtggttcata

SEQ ID NO: 3619 - DNA, 84 bp, Artificial Sequence
  Synthetic
tcaccagcagactttacgcagcttagctcttaaactagtggtgtccagagtgtcccaacaaggtggacgccttagtggttcata

SEQ ID NO: 3620 - DNA, 84 bp, Artificial Sequence
  Synthetic
tcaccagcagactttacgcagcttagctcttaaactgcaagtctcaggccagaaccaacaaggtggacgccttagtggttcata

SEQ ID NO: 3621 - DNA, 84 bp, Artificial Sequence
  Synthetic
tcaccagcagactttacgcagcttagctcttaaacccagggtgactgcgggattccaacaaggtggacgccttagtggttcata

SEQ ID NO: 3622 - DNA, 84 bp, Artificial Sequence
  Synthetic
tcaccagcagactttacgcagcttagctcttaaacgcagtcaccctggtggcctccaacaaggtggacgccttagtggttcata

SEQ ID NO: 3623 - DNA, 84 bp, Artificial Sequence
  Synthetic
tcaccagcagactttacgcagcttagctcttaaactggtggcctcgtggtgggaccaacaaggtggacgccttagtggttcata

SEQ ID NO: 3624 - DNA, 84 bp, Artificial Sequence
  Synthetic
tcaccagcagactttacgcagcttagctcttaaacctgacccactccgcagtctccaacaaggtggacgccttagtggttcata

SEQ ID NO: 3625 - DNA, 84 bp, Artificial Sequence
  Synthetic
tcaccagcagactttacgcagcttagctcttaaaccagtctgtgatcggaacctccaacaaggtggacgccttagtggttcata

SEQ ID NO: 3626 - DNA, 84 bp, Artificial Sequence
  Synthetic
tcaccagcagactttacgcagcttagctcttaaaccaagtcctaccgggtttgcccaacaaggtggacgccttagtggttcata

SEQ ID NO: 3627 - DNA, 84 bp, Artificial Sequence
  Synthetic
tcaccagcagactttacgcagcttagctcttaaacgttccggatgggcccgccgccaacaaggtggacgccttagtggttcata

SEQ ID NO: 3628 - DNA, 84 bp, Artificial Sequence
  Synthetic
tcaccagcagactttacgcagcttagctcttaaacatgcccgattccgcgcccgccaacaaggtggacgccttagtggttcata

SEQ ID NO: 3629 - DNA, 84 bp, Artificial Sequence
  Synthetic
tcaccagcagactttacgcagcttagctcttaaacgtcggttcctgccgcctccccaacaaggtggacgccttagtggttcata

SEQ ID NO: 3630 - DNA, 84 bp, Artificial Sequence
  Synthetic
tcaccagcagactttacgcagcttagctcttaaactcgggccggtgcagatacgccaacaaggtggacgccttagtggttcata

SEQ ID NO: 3631 - DNA, 84 bp, Artificial Sequence
  Synthetic
tcaccagcagactttacgcagcttagctcttaaacgatggcagcctagctcctcccaacaaggtggacgccttagtggttcata

SEQ ID NO: 3632 - DNA, 84 bp, Artificial Sequence
  Synthetic
tcaccagcagactttacgcagcttagctcttaaaccctaacccgagcacaaagaccaacaaggtggacgccttagtggttcata

SEQ ID NO: 3633 - DNA, 84 bp, Artificial Sequence
  Synthetic
tcaccagcagactttacgcagcttagctcttaaacacctaggcgcgagcgaactccaacaaggtggacgccttagtggttcata

SEQ ID NO: 3634 - DNA, 84 bp, Artificial Sequence
  Synthetic
tcaccagcagactttacgcagcttagctcttaaaccgccaacctaggcgcgagcccaacaaggtggacgccttagtggttcata

SEQ ID NO: 3635 - DNA, 84 bp, Artificial Sequence
  Synthetic
tcaccagcagactttacgcagcttagctcttaaacaggttggcgcgggctgggaccaacaaggtggacgccttagtggttcata

SEQ ID NO: 3636 - DNA, 84 bp, Artificial Sequence
  Synthetic
tcaccagcagactttacgcagcttagctcttaaacttgaggccctccctcggtgccaacaaggtggacgccttagtggttcata

SEQ ID NO: 3637 - DNA, 84 bp, Artificial Sequence
  Synthetic
tcaccagcagactttacgcagcttagctcttaaacacacttactcccagcagcgccaacaaggtggacgccttagtggttcata

SEQ ID NO: 3638 - DNA, 84 bp, Artificial Sequence
  Synthetic
tcaccagcagactttacgcagcttagctcttaaacgtcctctcagagcccggccccaacaaggtggacgccttagtggttcata

SEQ ID NO: 3639 - DNA, 84 bp, Artificial Sequence
  Synthetic
tcaccagcagactttacgcagcttagctcttaaacccggatccattttacctttccaacaaggtggacgccttagtggttcata

SEQ ID NO: 3640 - DNA, 84 bp, Artificial Sequence
  Synthetic
tcaccagcagactttacgcagcttagctcttaaaccctctggagtcataagttgccaacaaggtggacgccttagtggttcata

SEQ ID NO: 3641 - DNA, 84 bp, Artificial Sequence
  Synthetic
tcaccagcagactttacgcagcttagctcttaaacctggagtcataagttgtgcccaacaaggtggacgccttagtggttcata

SEQ ID NO: 3642 - DNA, 84 bp, Artificial Sequence
  Synthetic
tcaccagcagactttacgcagcttagctcttaaacccctttgagattgtcacagccaacaaggtggacgccttagtggttcata

SEQ ID NO: 3643 - DNA, 84 bp, Artificial Sequence
  Synthetic
tcaccagcagactttacgcagcttagctcttaaaccttccttctgggccatggaccaacaaggtggacgccttagtggttcata

SEQ ID NO: 3644 - DNA, 84 bp, Artificial Sequence
  Synthetic
tcaccagcagactttacgcagcttagctcttaaaccagtgactcctgagccacaccaacaaggtggacgccttagtggttcata

SEQ ID NO: 3645 - DNA, 84 bp, Artificial Sequence
  Synthetic
tcaccagcagactttacgcagcttagctcttaaacttctcggttcctggtctgtccaacaaggtggacgccttagtggttcata

SEQ ID NO: 3646 - DNA, 84 bp, Artificial Sequence
  Synthetic
tcaccagcagactttacgcagcttagctcttaaaccccgctcttgcgacttgctccaacaaggtggacgccttagtggttcata

SEQ ID NO: 3647 - DNA, 84 bp, Artificial Sequence
  Synthetic
tcaccagcagactttacgcagcttagctcttaaactgagcaagtcgcaagagcgccaacaaggtggacgccttagtggttcata

SEQ ID NO: 3648 - DNA, 84 bp, Artificial Sequence
  Synthetic
tcaccagcagactttacgcagcttagctcttaaaccacgaatcccagtcaggctccaacaaggtggacgccttagtggttcata

SEQ ID NO: 3649 - DNA, 84 bp, Artificial Sequence
  Synthetic
tcaccagcagactttacgcagcttagctcttaaacagtcaggctctttgtcctgccaacaaggtggacgccttagtggttcata

SEQ ID NO: 3650 - DNA, 84 bp, Artificial Sequence
  Synthetic
tcaccagcagactttacgcagcttagctcttaaacgtcccgctctttttttgaaccaacaaggtggacgccttagtggttcata

SEQ ID NO: 3651 - DNA, 84 bp, Artificial Sequence
  Synthetic
tcaccagcagactttacgcagcttagctcttaaacactattcctgggagctctgccaacaaggtggacgccttagtggttcata

SEQ ID NO: 3652 - DNA, 84 bp, Artificial Sequence
  Synthetic
tcaccagcagactttacgcagcttagctcttaaacactcttttctgaagcgctgccaacaaggtggacgccttagtggttcata

SEQ ID NO: 3653 - DNA, 84 bp, Artificial Sequence
  Synthetic
tcaccagcagactttacgcagcttagctcttaaactgtcccactcttttctgaaccaacaaggtggacgccttagtggttcata

SEQ ID NO: 3654 - DNA, 84 bp, Artificial Sequence
  Synthetic
tcaccagcagactttacgcagcttagctcttaaacggctctttttcctgctctgccaacaaggtggacgccttagtggttcata

SEQ ID NO: 3655 - DNA, 84 bp, Artificial Sequence
  Synthetic
tcaccagcagactttacgcagcttagctcttaaacccgaaagtcatggcagggcccaacaaggtggacgccttagtggttcata

SEQ ID NO: 3656 - DNA, 84 bp, Artificial Sequence
  Synthetic
tcaccagcagactttacgcagcttagctcttaaacggtttcaggacagccctccccaacaaggtggacgccttagtggttcata

SEQ ID NO: 3657 - DNA, 84 bp, Artificial Sequence
  Synthetic
tcaccagcagactttacgcagcttagctcttaaaccatctgtcccagcccaggtccaacaaggtggacgccttagtggttcata

SEQ ID NO: 3658 - DNA, 84 bp, Artificial Sequence
  Synthetic
tcaccagcagactttacgcagcttagctcttaaactactcccagccaggctcctccaacaaggtggacgccttagtggttcata

SEQ ID NO: 3659 - DNA, 84 bp, Artificial Sequence
  Synthetic
tcaccagcagactttacgcagcttagctcttaaacgccattcctgaactctggaccaacaaggtggacgccttagtggttcata

SEQ ID NO: 3660 - DNA, 84 bp, Artificial Sequence
  Synthetic
tcaccagcagactttacgcagcttagctcttaaaccagacaagcaggggcaagtccaacaaggtggacgccttagtggttcata

SEQ ID NO: 3661 - DNA, 84 bp, Artificial Sequence
  Synthetic
tcaccagcagactttacgcagcttagctcttaaacacccaggctctttgccctgccaacaaggtggacgccttagtggttcata

SEQ ID NO: 3662 - DNA, 84 bp, Artificial Sequence
  Synthetic
tcaccagcagactttacgcagcttagctcttaaacctgcttgtctgaggcactaccaacaaggtggacgccttagtggttcata

SEQ ID NO: 3663 - DNA, 84 bp, Artificial Sequence
  Synthetic
tcaccagcagactttacgcagcttagctcttaaacagttagaaagcccttgctgccaacaaggtggacgccttagtggttcata

SEQ ID NO: 3664 - DNA, 84 bp, Artificial Sequence
  Synthetic
tcaccagcagactttacgcagcttagctcttaaaccacctcagcaagggctttcccaacaaggtggacgccttagtggttcata

SEQ ID NO: 3665 - DNA, 84 bp, Artificial Sequence
  Synthetic
tcaccagcagactttacgcagcttagctcttaaacttgctgaggtgtggctaccccaacaaggtggacgccttagtggttcata

SEQ ID NO: 3666 - DNA, 84 bp, Artificial Sequence
  Synthetic
tcaccagcagactttacgcagcttagctcttaaacctgttactaccttgggctgccaacaaggtggacgccttagtggttcata

SEQ ID NO: 3667 - DNA, 84 bp, Artificial Sequence
  Synthetic
tcaccagcagactttacgcagcttagctcttaaacatctcttctgctggctgggccaacaaggtggacgccttagtggttcata

SEQ ID NO: 3668 - DNA, 84 bp, Artificial Sequence
  Synthetic
tcaccagcagactttacgcagcttagctcttaaacccagaagtcggagacggacccaacaaggtggacgccttagtggttcata

SEQ ID NO: 3669 - DNA, 84 bp, Artificial Sequence
  Synthetic
tcaccagcagactttacgcagcttagctcttaaacctcagcgagcctgagagtgccaacaaggtggacgccttagtggttcata

SEQ ID NO: 3670 - DNA, 84 bp, Artificial Sequence
  Synthetic
tcaccagcagactttacgcagcttagctcttaaacgaagattccacgagcgccgccaacaaggtggacgccttagtggttcata

SEQ ID NO: 3671 - DNA, 84 bp, Artificial Sequence
  Synthetic
tcaccagcagactttacgcagcttagctcttaaacacaaggcctttcggcgcagccaacaaggtggacgccttagtggttcata

SEQ ID NO: 3672 - DNA, 84 bp, Artificial Sequence
  Synthetic
tcaccagcagactttacgcagcttagctcttaaaccacaaacgctccgggccggccaacaaggtggacgccttagtggttcata

SEQ ID NO: 3673 - DNA, 84 bp, Artificial Sequence
  Synthetic
tcaccagcagactttacgcagcttagctcttaaactagggaacccgtacaacagccaacaaggtggacgccttagtggttcata

SEQ ID NO: 3674 - DNA, 84 bp, Artificial Sequence
  Synthetic
tcaccagcagactttacgcagcttagctcttaaactaagttactgccggggcgcccaacaaggtggacgccttagtggttcata

SEQ ID NO: 3675 - DNA, 84 bp, Artificial Sequence
  Synthetic
tcaccagcagactttacgcagcttagctcttaaaccgctgtgactctccgctttccaacaaggtggacgccttagtggttcata

SEQ ID NO: 3676 - DNA, 84 bp, Artificial Sequence
  Synthetic
tcaccagcagactttacgcagcttagctcttaaaccctcattcccaggcaagggccaacaaggtggacgccttagtggttcata

SEQ ID NO: 3677 - DNA, 84 bp, Artificial Sequence
  Synthetic
tcaccagcagactttacgcagcttagctcttaaacctttctgctgccggagaaaccaacaaggtggacgccttagtggttcata

SEQ ID NO: 3678 - DNA, 84 bp, Artificial Sequence
  Synthetic
tcaccagcagactttacgcagcttagctcttaaaccccagcatgggtcccggtgccaacaaggtggacgccttagtggttcata

SEQ ID NO: 3679 - DNA, 84 bp, Artificial Sequence
  Synthetic
tcaccagcagactttacgcagcttagctcttaaactccttgagagccgcctcggccaacaaggtggacgccttagtggttcata

SEQ ID NO: 3680 - DNA, 84 bp, Artificial Sequence
  Synthetic
tcaccagcagactttacgcagcttagctcttaaaccggcgatcatggccgcgcgccaacaaggtggacgccttagtggttcata

SEQ ID NO: 3681 - DNA, 84 bp, Artificial Sequence
  Synthetic
tcaccagcagactttacgcagcttagctcttaaacccgacgggtgctggttctgccaacaaggtggacgccttagtggttcata

SEQ ID NO: 3682 - DNA, 84 bp, Artificial Sequence
  Synthetic
tcaccagcagactttacgcagcttagctcttaaacccgtagctccgcatcatggccaacaaggtggacgccttagtggttcata

SEQ ID NO: 3683 - DNA, 84 bp, Artificial Sequence
  Synthetic
tcaccagcagactttacgcagcttagctcttaaactcaatcagctgctcacctcccaacaaggtggacgccttagtggttcata

SEQ ID NO: 3684 - DNA, 84 bp, Artificial Sequence
  Synthetic
tcaccagcagactttacgcagcttagctcttaaaccggcgctgcccccccggttccaacaaggtggacgccttagtggttcata

SEQ ID NO: 3685 - DNA, 84 bp, Artificial Sequence
  Synthetic
tcaccagcagactttacgcagcttagctcttaaacattcctcggccggcggcggccaacaaggtggacgccttagtggttcata

SEQ ID NO: 3686 - DNA, 84 bp, Artificial Sequence
  Synthetic
tcaccagcagactttacgcagcttagctcttaaacccgccggcccatgactgagccaacaaggtggacgccttagtggttcata

SEQ ID NO: 3687 - DNA, 84 bp, Artificial Sequence
  Synthetic
tcaccagcagactttacgcagcttagctcttaaaccgccgggtctgtgcgtcttccaacaaggtggacgccttagtggttcata

SEQ ID NO: 3688 - DNA, 84 bp, Artificial Sequence
  Synthetic
tcaccagcagactttacgcagcttagctcttaaacggtctgtgcgtctttgcgtccaacaaggtggacgccttagtggttcata

SEQ ID NO: 3689 - DNA, 84 bp, Artificial Sequence
  Synthetic
tcaccagcagactttacgcagcttagctcttaaactcctcgccgggtctgtgcgccaacaaggtggacgccttagtggttcata

SEQ ID NO: 3690 - DNA, 84 bp, Artificial Sequence
  Synthetic
tcaccagcagactttacgcagcttagctcttaaacctgcacgacgtctggccggccaacaaggtggacgccttagtggttcata

SEQ ID NO: 3691 - DNA, 84 bp, Artificial Sequence
  Synthetic
tcaccagcagactttacgcagcttagctcttaaacatttcactaaactacagccccaacaaggtggacgccttagtggttcata

SEQ ID NO: 3692 - DNA, 84 bp, Artificial Sequence
  Synthetic
tcaccagcagactttacgcagcttagctcttaaacctacattgttcacctgaacccaacaaggtggacgccttagtggttcata

SEQ ID NO: 3693 - DNA, 84 bp, Artificial Sequence
  Synthetic
tcaccagcagactttacgcagcttagctcttaaaccccgcggccacggcttcttccaacaaggtggacgccttagtggttcata

SEQ ID NO: 3694 - DNA, 84 bp, Artificial Sequence
  Synthetic
tcaccagcagactttacgcagcttagctcttaaacttagccacgcagctacctaccaacaaggtggacgccttagtggttcata

SEQ ID NO: 3695 - DNA, 84 bp, Artificial Sequence
  Synthetic
tcaccagcagactttacgcagcttagctcttaaacactcccgcttccggttcaaccaacaaggtggacgccttagtggttcata

SEQ ID NO: 3696 - DNA, 84 bp, Artificial Sequence
  Synthetic
tcaccagcagactttacgcagcttagctcttaaacacactgccgcagtccctccccaacaaggtggacgccttagtggttcata

SEQ ID NO: 3697 - DNA, 84 bp, Artificial Sequence
  Synthetic
tcaccagcagactttacgcagcttagctcttaaaccgtcagccctgctccagccccaacaaggtggacgccttagtggttcata

SEQ ID NO: 3698 - DNA, 84 bp, Artificial Sequence
  Synthetic
tcaccagcagactttacgcagcttagctcttaaaccgccgagcctggtggcccaccaacaaggtggacgccttagtggttcata

SEQ ID NO: 3699 - DNA, 84 bp, Artificial Sequence
  Synthetic
tcaccagcagactttacgcagcttagctcttaaacatactcaccgccttgggctccaacaaggtggacgccttagtggttcata

SEQ ID NO: 3700 - DNA, 84 bp, Artificial Sequence
  Synthetic
tcaccagcagactttacgcagcttagctcttaaactctgaactcaaccggcgagccaacaaggtggacgccttagtggttcata

SEQ ID NO: 3701 - DNA, 84 bp, Artificial Sequence
  Synthetic
tcaccagcagactttacgcagcttagctcttaaacctccctggttgagcaaagcccaacaaggtggacgccttagtggttcata

SEQ ID NO: 3702 - DNA, 84 bp, Artificial Sequence
  Synthetic
tcaccagcagactttacgcagcttagctcttaaacacgcgggttcccggcgtctccaacaaggtggacgccttagtggttcata

SEQ ID NO: 3703 - DNA, 84 bp, Artificial Sequence
  Synthetic
tcaccagcagactttacgcagcttagctcttaaaccgccaacgcgggttcccggccaacaaggtggacgccttagtggttcata

SEQ ID NO: 3704 - DNA, 84 bp, Artificial Sequence
  Synthetic
tcaccagcagactttacgcagcttagctcttaaacccacacggctccgtcgggcccaacaaggtggacgccttagtggttcata

SEQ ID NO: 3705 - DNA, 84 bp, Artificial Sequence
  Synthetic
tcaccagcagactttacgcagcttagctcttaaaccttgcctccgccgcgagtgccaacaaggtggacgccttagtggttcata

SEQ ID NO: 3706 - DNA, 84 bp, Artificial Sequence
  Synthetic
tcaccagcagactttacgcagcttagctcttaaacaagtatccgacagcgccgaccaacaaggtggacgccttagtggttcata

SEQ ID NO: 3707 - DNA, 84 bp, Artificial Sequence
  Synthetic
tcaccagcagactttacgcagcttagctcttaaacgttctccggcctggcggcaccaacaaggtggacgccttagtggttcata

SEQ ID NO: 3708 - DNA, 84 bp, Artificial Sequence
  Synthetic
tcaccagcagactttacgcagcttagctcttaaacttttgttgggccgaggctcccaacaaggtggacgccttagtggttcata

SEQ ID NO: 3709 - DNA, 84 bp, Artificial Sequence
  Synthetic
tcaccagcagactttacgcagcttagctcttaaacatctgcgctcccccgcgccccaacaaggtggacgccttagtggttcata

SEQ ID NO: 3710 - DNA, 84 bp, Artificial Sequence
  Synthetic
tcaccagcagactttacgcagcttagctcttaaacagcggtctgggcccaggcaccaacaaggtggacgccttagtggttcata

SEQ ID NO: 3711 - DNA, 84 bp, Artificial Sequence
  Synthetic
tcaccagcagactttacgcagcttagctcttaaacccgactcactaggaagccgccaacaaggtggacgccttagtggttcata

SEQ ID NO: 3712 - DNA, 84 bp, Artificial Sequence
  Synthetic
tcaccagcagactttacgcagcttagctcttaaacccatctttacagccggaagccaacaaggtggacgccttagtggttcata

SEQ ID NO: 3713 - DNA, 84 bp, Artificial Sequence
  Synthetic
tcaccagcagactttacgcagcttagctcttaaacaccttcggctcaccgtagcccaacaaggtggacgccttagtggttcata

SEQ ID NO: 3714 - DNA, 84 bp, Artificial Sequence
  Synthetic
tcaccagcagactttacgcagcttagctcttaaacgcgccttcactggacctgtccaacaaggtggacgccttagtggttcata

SEQ ID NO: 3715 - DNA, 84 bp, Artificial Sequence
  Synthetic
tcaccagcagactttacgcagcttagctcttaaactcactggacctgtccgccgccaacaaggtggacgccttagtggttcata

SEQ ID NO: 3716 - DNA, 84 bp, Artificial Sequence
  Synthetic
tcaccagcagactttacgcagcttagctcttaaacctcaccagagctgaggcgcccaacaaggtggacgccttagtggttcata

SEQ ID NO: 3717 - DNA, 84 bp, Artificial Sequence
  Synthetic
tcaccagcagactttacgcagcttagctcttaaaccgtctgggacggcgggccgccaacaaggtggacgccttagtggttcata

SEQ ID NO: 3718 - DNA, 84 bp, Artificial Sequence
  Synthetic
tcaccagcagactttacgcagcttagctcttaaacgtggtttcccgaggcttccccaacaaggtggacgccttagtggttcata

SEQ ID NO: 3719 - DNA, 84 bp, Artificial Sequence
  Synthetic
tcaccagcagactttacgcagcttagctcttaaacgttcctcggctgccgattaccaacaaggtggacgccttagtggttcata

SEQ ID NO: 3720 - DNA, 84 bp, Artificial Sequence
  Synthetic
tcaccagcagactttacgcagcttagctcttaaacctcggagctcctgggaagtccaacaaggtggacgccttagtggttcata

SEQ ID NO: 3721 - DNA, 84 bp, Artificial Sequence
  Synthetic
tcaccagcagactttacgcagcttagctcttaaaccgcctctcggagctcctggccaacaaggtggacgccttagtggttcata

SEQ ID NO: 3722 - DNA, 84 bp, Artificial Sequence
  Synthetic
tcaccagcagactttacgcagcttagctcttaaacccacttccccgcctctcggccaacaaggtggacgccttagtggttcata

SEQ ID NO: 3723 - DNA, 84 bp, Artificial Sequence
  Synthetic
tcaccagcagactttacgcagcttagctcttaaaccttcgggtcccggcggccgccaacaaggtggacgccttagtggttcata

SEQ ID NO: 3724 - DNA, 84 bp, Artificial Sequence
  Synthetic
tcaccagcagactttacgcagcttagctcttaaactggcgttccgctccatgacccaacaaggtggacgccttagtggttcata

SEQ ID NO: 3725 - DNA, 84 bp, Artificial Sequence
  Synthetic
tcaccagcagactttacgcagcttagctcttaaacccggtgctgctgaggaggaccaacaaggtggacgccttagtggttcata

SEQ ID NO: 3726 - DNA, 84 bp, Artificial Sequence
  Synthetic
tcaccagcagactttacgcagcttagctcttaaacacaattcatcttccctgcgccaacaaggtggacgccttagtggttcata

SEQ ID NO: 3727 - DNA, 84 bp, Artificial Sequence
  Synthetic
tcaccagcagactttacgcagcttagctcttaaacaccatgtctcgccgcaagcccaacaaggtggacgccttagtggttcata

SEQ ID NO: 3728 - DNA, 84 bp, Artificial Sequence
  Synthetic
tcaccagcagactttacgcagcttagctcttaaaccacttgaacttgcagctcaccaacaaggtggacgccttagtggttcata

SEQ ID NO: 3729 - DNA, 84 bp, Artificial Sequence
  Synthetic
tcaccagcagactttacgcagcttagctcttaaaccggactggctggtttctttccaacaaggtggacgccttagtggttcata

SEQ ID NO: 3730 - DNA, 84 bp, Artificial Sequence
  Synthetic
tcaccagcagactttacgcagcttagctcttaaacacccgggcagaggaggaggccaacaaggtggacgccttagtggttcata

SEQ ID NO: 3731 - DNA, 84 bp, Artificial Sequence
  Synthetic
tcaccagcagactttacgcagcttagctcttaaacaccagaccctgaaagaaagccaacaaggtggacgccttagtggttcata

SEQ ID NO: 3732 - DNA, 84 bp, Artificial Sequence
  Synthetic
tcaccagcagactttacgcagcttagctcttaaacctcactcactcgcgcacagccaacaaggtggacgccttagtggttcata

SEQ ID NO: 3733 - DNA, 84 bp, Artificial Sequence
  Synthetic
tcaccagcagactttacgcagcttagctcttaaacccgggtcctgctcgcgctcccaacaaggtggacgccttagtggttcata

SEQ ID NO: 3734 - DNA, 84 bp, Artificial Sequence
  Synthetic
tcaccagcagactttacgcagcttagctcttaaacgacatggttccggcggggaccaacaaggtggacgccttagtggttcata

SEQ ID NO: 3735 - DNA, 84 bp, Artificial Sequence
  Synthetic
tcaccagcagactttacgcagcttagctcttaaacccatgtcgggccggtcggtccaacaaggtggacgccttagtggttcata

SEQ ID NO: 3736 - DNA, 84 bp, Artificial Sequence
  Synthetic
tcaccagcagactttacgcagcttagctcttaaaccggtgtcttgggagcagtgccaacaaggtggacgccttagtggttcata

SEQ ID NO: 3737 - DNA, 84 bp, Artificial Sequence
  Synthetic
tcaccagcagactttacgcagcttagctcttaaacacctgacccgccagtcccaccaacaaggtggacgccttagtggttcata

SEQ ID NO: 3738 - DNA, 84 bp, Artificial Sequence
  Synthetic
tcaccagcagactttacgcagcttagctcttaaactggagttggccgcgccctcccaacaaggtggacgccttagtggttcata

SEQ ID NO: 3739 - DNA, 84 bp, Artificial Sequence
  Synthetic
tcaccagcagactttacgcagcttagctcttaaacctgtgtcccgtccctggccccaacaaggtggacgccttagtggttcata

SEQ ID NO: 3740 - DNA, 84 bp, Artificial Sequence
  Synthetic
tcaccagcagactttacgcagcttagctcttaaacccctggagttggccgcgccccaacaaggtggacgccttagtggttcata

SEQ ID NO: 3741 - DNA, 84 bp, Artificial Sequence
  Synthetic
tcaccagcagactttacgcagcttagctcttaaactcgacgcgctagcacgtctccaacaaggtggacgccttagtggttcata

SEQ ID NO: 3742 - DNA, 84 bp, Artificial Sequence
  Synthetic
tcaccagcagactttacgcagcttagctcttaaactagagctaccttcgacgcgccaacaaggtggacgccttagtggttcata

SEQ ID NO: 3743 - DNA, 84 bp, Artificial Sequence
  Synthetic
tcaccagcagactttacgcagcttagctcttaaaccacagcggccatttcccgaccaacaaggtggacgccttagtggttcata

SEQ ID NO: 3744 - DNA, 84 bp, Artificial Sequence
  Synthetic
tcaccagcagactttacgcagcttagctcttaaactccgctaggagtctgcgtgccaacaaggtggacgccttagtggttcata

SEQ ID NO: 3745 - DNA, 84 bp, Artificial Sequence
  Synthetic
tcaccagcagactttacgcagcttagctcttaaacctaggagtctgcgtgcgagccaacaaggtggacgccttagtggttcata

SEQ ID NO: 3746 - DNA, 84 bp, Artificial Sequence
  Synthetic
tcaccagcagactttacgcagcttagctcttaaacggatccaaacttcccgcgcccaacaaggtggacgccttagtggttcata

SEQ ID NO: 3747 - DNA, 84 bp, Artificial Sequence
  Synthetic
tcaccagcagactttacgcagcttagctcttaaaccattgtctcgccccgatctccaacaaggtggacgccttagtggttcata

SEQ ID NO: 3748 - DNA, 84 bp, Artificial Sequence
  Synthetic
tcaccagcagactttacgcagcttagctcttaaacgtgtcagtttccactctgcccaacaaggtggacgccttagtggttcata

SEQ ID NO: 3749 - DNA, 84 bp, Artificial Sequence
  Synthetic
tcaccagcagactttacgcagcttagctcttaaacacatccccattgtctcgccccaacaaggtggacgccttagtggttcata

SEQ ID NO: 3750 - DNA, 84 bp, Artificial Sequence
  Synthetic
tcaccagcagactttacgcagcttagctcttaaacggacgggggacaggctgtgccaacaaggtggacgccttagtggttcata

SEQ ID NO: 3751 - DNA, 84 bp, Artificial Sequence
  Synthetic
tcaccagcagactttacgcagcttagctcttaaacctgcgctcaggaggccttcccaacaaggtggacgccttagtggttcata

SEQ ID NO: 3752 - DNA, 84 bp, Artificial Sequence
  Synthetic
tcaccagcagactttacgcagcttagctcttaaacgtccaggaagtctcagcgaccaacaaggtggacgccttagtggttcata

SEQ ID NO: 3753 - DNA, 84 bp, Artificial Sequence
  Synthetic
tcaccagcagactttacgcagcttagctcttaaacctgctgcgcctcgggtgtcccaacaaggtggacgccttagtggttcata

SEQ ID NO: 3754 - DNA, 84 bp, Artificial Sequence
  Synthetic
tcaccagcagactttacgcagcttagctcttaaacgtcacaaatctgtcccctcccaacaaggtggacgccttagtggttcata

SEQ ID NO: 3755 - DNA, 84 bp, Artificial Sequence
  Synthetic
tcaccagcagactttacgcagcttagctcttaaacagtttcagaagctcgcgccccaacaaggtggacgccttagtggttcata

SEQ ID NO: 3756 - DNA, 84 bp, Artificial Sequence
  Synthetic
tcaccagcagactttacgcagcttagctcttaaacttctcacgtccgcctcgggccaacaaggtggacgccttagtggttcata

SEQ ID NO: 3757 - DNA, 84 bp, Artificial Sequence
  Synthetic
tcaccagcagactttacgcagcttagctcttaaactcttggcccgacccttctcccaacaaggtggacgccttagtggttcata

SEQ ID NO: 3758 - DNA, 84 bp, Artificial Sequence
  Synthetic
tcaccagcagactttacgcagcttagctcttaaaccctcgggcccacttggtccccaacaaggtggacgccttagtggttcata

SEQ ID NO: 3759 - DNA, 84 bp, Artificial Sequence
  Synthetic
tcaccagcagactttacgcagcttagctcttaaacctacgagggtgaggaggggccaacaaggtggacgccttagtggttcata

SEQ ID NO: 3760 - DNA, 84 bp, Artificial Sequence
  Synthetic
tcaccagcagactttacgcagcttagctcttaaactcttctcgagaggggcatcccaacaaggtggacgccttagtggttcata

SEQ ID NO: 3761 - DNA, 84 bp, Artificial Sequence
  Synthetic
tcaccagcagactttacgcagcttagctcttaaacgggtgcgggcggcgggcccccaacaaggtggacgccttagtggttcata

SEQ ID NO: 3762 - DNA, 84 bp, Artificial Sequence
  Synthetic
tcaccagcagactttacgcagcttagctcttaaacgttcccgtcgccatcttggccaacaaggtggacgccttagtggttcata

SEQ ID NO: 3763 - DNA, 84 bp, Artificial Sequence
  Synthetic
tcaccagcagactttacgcagcttagctcttaaaccgaagtctccaaccctgagccaacaaggtggacgccttagtggttcata

SEQ ID NO: 3764 - DNA, 84 bp, Artificial Sequence
  Synthetic
tcaccagcagactttacgcagcttagctcttaaacgtcgccatcttggccccgaccaacaaggtggacgccttagtggttcata

SEQ ID NO: 3765 - DNA, 84 bp, Artificial Sequence
  Synthetic
tcaccagcagactttacgcagcttagctcttaaacacgagggtgaggcggcggcccaacaaggtggacgccttagtggttcata

SEQ ID NO: 3766 - DNA, 84 bp, Artificial Sequence
  Synthetic
tcaccagcagactttacgcagcttagctcttaaaccctcaccctcgtaggacgaccaacaaggtggacgccttagtggttcata

SEQ ID NO: 3767 - DNA, 84 bp, Artificial Sequence
  Synthetic
tcaccagcagactttacgcagcttagctcttaaacaggttgccgagctcgctggccaacaaggtggacgccttagtggttcata

SEQ ID NO: 3768 - DNA, 84 bp, Artificial Sequence
  Synthetic
tcaccagcagactttacgcagcttagctcttaaacgttaccgatcggactaagtccaacaaggtggacgccttagtggttcata

SEQ ID NO: 3769 - DNA, 84 bp, Artificial Sequence
  Synthetic
tcaccagcagactttacgcagcttagctcttaaacccgacagacgcaccgacctccaacaaggtggacgccttagtggttcata

SEQ ID NO: 3770 - DNA, 84 bp, Artificial Sequence
  Synthetic
tcaccagcagactttacgcagcttagctcttaaactaggaagaggaggcgagtcccaacaaggtggacgccttagtggttcata

SEQ ID NO: 3771 - DNA, 84 bp, Artificial Sequence
  Synthetic
tcaccagcagactttacgcagcttagctcttaaacttccgtggacttccctccgccaacaaggtggacgccttagtggttcata

SEQ ID NO: 3772 - DNA, 84 bp, Artificial Sequence
  Synthetic
tcaccagcagactttacgcagcttagctcttaaacttcctcgacccaccagaccccaacaaggtggacgccttagtggttcata

SEQ ID NO: 3773 - DNA, 84 bp, Artificial Sequence
  Synthetic
tcaccagcagactttacgcagcttagctcttaaaccgacccaccagacccctcaccaacaaggtggacgccttagtggttcata

SEQ ID NO: 3774 - DNA, 84 bp, Artificial Sequence
  Synthetic
tcaccagcagactttacgcagcttagctcttaaacattcgaataccccgcgcagccaacaaggtggacgccttagtggttcata

SEQ ID NO: 3775 - DNA, 84 bp, Artificial Sequence
  Synthetic
tcaccagcagactttacgcagcttagctcttaaactgctgggtgggacacattcccaacaaggtggacgccttagtggttcata

SEQ ID NO: 3776 - DNA, 84 bp, Artificial Sequence
  Synthetic
tcaccagcagactttacgcagcttagctcttaaactctggtggggtggggaagcccaacaaggtggacgccttagtggttcata

SEQ ID NO: 3777 - DNA, 84 bp, Artificial Sequence
  Synthetic
tcaccagcagactttacgcagcttagctcttaaacgtccaaggcccgaatacagccaacaaggtggacgccttagtggttcata

SEQ ID NO: 3778 - DNA, 84 bp, Artificial Sequence
  Synthetic
tcaccagcagactttacgcagcttagctcttaaacaatacagccggcaggaaccccaacaaggtggacgccttagtggttcata

SEQ ID NO: 3779 - DNA, 84 bp, Artificial Sequence
  Synthetic
tcaccagcagactttacgcagcttagctcttaaaccaccgtcccagtctagagaccaacaaggtggacgccttagtggttcata

SEQ ID NO: 3780 - DNA, 84 bp, Artificial Sequence
  Synthetic
tcaccagcagactttacgcagcttagctcttaaacttcccatgtggctaaatggccaacaaggtggacgccttagtggttcata

SEQ ID NO: 3781 - DNA, 84 bp, Artificial Sequence
  Synthetic
tcaccagcagactttacgcagcttagctcttaaacggcggaagtgagcgcaagcccaacaaggtggacgccttagtggttcata

SEQ ID NO: 3782 - DNA, 84 bp, Artificial Sequence
  Synthetic
tcaccagcagactttacgcagcttagctcttaaaccggctggggttgagccgccccaacaaggtggacgccttagtggttcata

SEQ ID NO: 3783 - DNA, 84 bp, Artificial Sequence
  Synthetic
tcaccagcagactttacgcagcttagctcttaaaccacgtaacccagcctcgcgccaacaaggtggacgccttagtggttcata

SEQ ID NO: 3784 - DNA, 84 bp, Artificial Sequence
  Synthetic
tcaccagcagactttacgcagcttagctcttaaaccggaggccggaacccattcccaacaaggtggacgccttagtggttcata

SEQ ID NO: 3785 - DNA, 84 bp, Artificial Sequence
  Synthetic
tcaccagcagactttacgcagcttagctcttaaacattctaggcacctcagggcccaacaaggtggacgccttagtggttcata

SEQ ID NO: 3786 - DNA, 84 bp, Artificial Sequence
  Synthetic
tcaccagcagactttacgcagcttagctcttaaactttgtttacacgcccgcggccaacaaggtggacgccttagtggttcata

SEQ ID NO: 3787 - DNA, 84 bp, Artificial Sequence
  Synthetic
tcaccagcagactttacgcagcttagctcttaaacgtcacccgcccggaccgccccaacaaggtggacgccttagtggttcata

SEQ ID NO: 3788 - DNA, 84 bp, Artificial Sequence
  Synthetic
tcaccagcagactttacgcagcttagctcttaaacccagtcacccgcccggaccccaacaaggtggacgccttagtggttcata

SEQ ID NO: 3789 - DNA, 84 bp, Artificial Sequence
  Synthetic
tcaccagcagactttacgcagcttagctcttaaacacagctggcagctccatggccaacaaggtggacgccttagtggttcata

SEQ ID NO: 3790 - DNA, 84 bp, Artificial Sequence
  Synthetic
tcaccagcagactttacgcagcttagctcttaaaccggcccgggctcagttgtcccaacaaggtggacgccttagtggttcata

SEQ ID NO: 3791 - DNA, 84 bp, Artificial Sequence
  Synthetic
tcaccagcagactttacgcagcttagctcttaaaccgacttacttgggcgaccaccaacaaggtggacgccttagtggttcata

SEQ ID NO: 3792 - DNA, 84 bp, Artificial Sequence
  Synthetic
tcaccagcagactttacgcagcttagctcttaaacacagcccataatactccctccaacaaggtggacgccttagtggttcata

SEQ ID NO: 3793 - DNA, 84 bp, Artificial Sequence
  Synthetic
tcaccagcagactttacgcagcttagctcttaaaccaccggccgcgggcgcaggccaacaaggtggacgccttagtggttcata

SEQ ID NO: 3794 - DNA, 84 bp, Artificial Sequence
  Synthetic
tcaccagcagactttacgcagcttagctcttaaacataatactccctgcgcccgccaacaaggtggacgccttagtggttcata

SEQ ID NO: 3795 - DNA, 84 bp, Artificial Sequence
  Synthetic
tcaccagcagactttacgcagcttagctcttaaactcgtccgggcgcgcacgcgccaacaaggtggacgccttagtggttcata

SEQ ID NO: 3796 - DNA, 84 bp, Artificial Sequence
  Synthetic
tcaccagcagactttacgcagcttagctcttaaacgctcgccgatggctgacagccaacaaggtggacgccttagtggttcata

SEQ ID NO: 3797 - DNA, 84 bp, Artificial Sequence
  Synthetic
tcaccagcagactttacgcagcttagctcttaaaccagtggggtccctcccgtcccaacaaggtggacgccttagtggttcata

SEQ ID NO: 3798 - DNA, 84 bp, Artificial Sequence
  Synthetic
tcaccagcagactttacgcagcttagctcttaaacaggggggaagcggcgagtcccaacaaggtggacgccttagtggttcata

SEQ ID NO: 3799 - DNA, 84 bp, Artificial Sequence
  Synthetic
tcaccagcagactttacgcagcttagctcttaaactgttgactcgccgcttcccccaacaaggtggacgccttagtggttcata

SEQ ID NO: 3800 - DNA, 84 bp, Artificial Sequence
  Synthetic
tcaccagcagactttacgcagcttagctcttaaacttggccgcttccaggagcaccaacaaggtggacgccttagtggttcata

SEQ ID NO: 3801 - DNA, 84 bp, Artificial Sequence
  Synthetic
tcaccagcagactttacgcagcttagctcttaaacccctcctcctacagagcagccaacaaggtggacgccttagtggttcata

SEQ ID NO: 3802 - DNA, 84 bp, Artificial Sequence
  Synthetic
tcaccagcagactttacgcagcttagctcttaaacttgctccgcggtgattggcccaacaaggtggacgccttagtggttcata

SEQ ID NO: 3803 - DNA, 84 bp, Artificial Sequence
  Synthetic
tcaccagcagactttacgcagcttagctcttaaacatcacctggaactcggcgaccaacaaggtggacgccttagtggttcata

SEQ ID NO: 3804 - DNA, 84 bp, Artificial Sequence
  Synthetic
tcaccagcagactttacgcagcttagctcttaaacctcttcccgtcgttatcttccaacaaggtggacgccttagtggttcata

SEQ ID NO: 3805 - DNA, 84 bp, Artificial Sequence
  Synthetic
tcaccagcagactttacgcagcttagctcttaaacgtcgttatctttctatgtgccaacaaggtggacgccttagtggttcata

SEQ ID NO: 3806 - DNA, 84 bp, Artificial Sequence
  Synthetic
tcaccagcagactttacgcagcttagctcttaaaccggtccttcccagctgagaccaacaaggtggacgccttagtggttcata

SEQ ID NO: 3807 - DNA, 84 bp, Artificial Sequence
  Synthetic
tcaccagcagactttacgcagcttagctcttaaaccctacaccgcgctggcggcccaacaaggtggacgccttagtggttcata

SEQ ID NO: 3808 - DNA, 84 bp, Artificial Sequence
  Synthetic
tcaccagcagactttacgcagcttagctcttaaacacaccgcgctggcggccgcccaacaaggtggacgccttagtggttcata

SEQ ID NO: 3809 - DNA, 84 bp, Artificial Sequence
  Synthetic
tcaccagcagactttacgcagcttagctcttaaacgggtcttgtccgcggcggaccaacaaggtggacgccttagtggttcata

SEQ ID NO: 3810 - DNA, 84 bp, Artificial Sequence
  Synthetic
tcaccagcagactttacgcagcttagctcttaaactaggcttccgcgagatcttccaacaaggtggacgccttagtggttcata

SEQ ID NO: 3811 - DNA, 84 bp, Artificial Sequence
  Synthetic
tcaccagcagactttacgcagcttagctcttaaacccgaagatctcgcggaagcccaacaaggtggacgccttagtggttcata

SEQ ID NO: 3812 - DNA, 84 bp, Artificial Sequence
  Synthetic
tcaccagcagactttacgcagcttagctcttaaacccaccgaagatctcgcggaccaacaaggtggacgccttagtggttcata

SEQ ID NO: 3813 - DNA, 84 bp, Artificial Sequence
  Synthetic
tcaccagcagactttacgcagcttagctcttaaacatggttcgggttcagggtcccaacaaggtggacgccttagtggttcata

SEQ ID NO: 3814 - DNA, 84 bp, Artificial Sequence
  Synthetic
tcaccagcagactttacgcagcttagctcttaaaccttgttaggtaccgggttaccaacaaggtggacgccttagtggttcata

SEQ ID NO: 3815 - DNA, 84 bp, Artificial Sequence
  Synthetic
tcaccagcagactttacgcagcttagctcttaaacgaggtggcagttaaggtaaccaacaaggtggacgccttagtggttcata

SEQ ID NO: 3816 - DNA, 84 bp, Artificial Sequence
  Synthetic
tcaccagcagactttacgcagcttagctcttaaaccgtcgctctccgctcaattccaacaaggtggacgccttagtggttcata

SEQ ID NO: 3817 - DNA, 84 bp, Artificial Sequence
  Synthetic
tcaccagcagactttacgcagcttagctcttaaactccgaggccctcggccgtcccaacaaggtggacgccttagtggttcata

SEQ ID NO: 3818 - DNA, 84 bp, Artificial Sequence
  Synthetic
tcaccagcagactttacgcagcttagctcttaaaccggaataataagccgggtaccaacaaggtggacgccttagtggttcata

SEQ ID NO: 3819 - DNA, 84 bp, Artificial Sequence
  Synthetic
tcaccagcagactttacgcagcttagctcttaaactccccgtccttccagagagccaacaaggtggacgccttagtggttcata

SEQ ID NO: 3820 - DNA, 84 bp, Artificial Sequence
  Synthetic
tcaccagcagactttacgcagcttagctcttaaacttttcggctggagtcgggcccaacaaggtggacgccttagtggttcata

SEQ ID NO: 3821 - DNA, 84 bp, Artificial Sequence
  Synthetic
tcaccagcagactttacgcagcttagctcttaaactcgctttagtatccccgccccaacaaggtggacgccttagtggttcata

SEQ ID NO: 3822 - DNA, 84 bp, Artificial Sequence
  Synthetic
tcaccagcagactttacgcagcttagctcttaaacaccatggcttccgaggagcccaacaaggtggacgccttagtggttcata

SEQ ID NO: 3823 - DNA, 84 bp, Artificial Sequence
  Synthetic
tcaccagcagactttacgcagcttagctcttaaaccgatccggccgcgccgcccccaacaaggtggacgccttagtggttcata

SEQ ID NO: 3824 - DNA, 84 bp, Artificial Sequence
  Synthetic
tcaccagcagactttacgcagcttagctcttaaacctctccggtgtagtgcagaccaacaaggtggacgccttagtggttcata

SEQ ID NO: 3825 - DNA, 84 bp, Artificial Sequence
  Synthetic
tcaccagcagactttacgcagcttagctcttaaacgacctgctcccgttgttgtccaacaaggtggacgccttagtggttcata

SEQ ID NO: 3826 - DNA, 84 bp, Artificial Sequence
  Synthetic
tcaccagcagactttacgcagcttagctcttaaactcgatgatcaattgtttggccaacaaggtggacgccttagtggttcata

SEQ ID NO: 3827 - DNA, 84 bp, Artificial Sequence
  Synthetic
tcaccagcagactttacgcagcttagctcttaaacatctcgggagaatgataacccaacaaggtggacgccttagtggttcata

SEQ ID NO: 3828 - DNA, 84 bp, Artificial Sequence
  Synthetic
tcaccagcagactttacgcagcttagctcttaaacgttgttaggcaaccgacgtccaacaaggtggacgccttagtggttcata

SEQ ID NO: 3829 - DNA, 84 bp, Artificial Sequence
  Synthetic
tcaccagcagactttacgcagcttagctcttaaacacgtgtacactgactcggcccaacaaggtggacgccttagtggttcata

SEQ ID NO: 3830 - DNA, 84 bp, Artificial Sequence
  Synthetic
tcaccagcagactttacgcagcttagctcttaaacctgggcgtggggcgcgacaccaacaaggtggacgccttagtggttcata

SEQ ID NO: 3831 - DNA, 84 bp, Artificial Sequence
  Synthetic
tcaccagcagactttacgcagcttagctcttaaactatcacctctctaccccttccaacaaggtggacgccttagtggttcata

SEQ ID NO: 3832 - DNA, 84 bp, Artificial Sequence
  Synthetic
tcaccagcagactttacgcagcttagctcttaaactactgcccttcctttcctcccaacaaggtggacgccttagtggttcata

SEQ ID NO: 3833 - DNA, 84 bp, Artificial Sequence
  Synthetic
tcaccagcagactttacgcagcttagctcttaaactagatgttaaagaactgaaccaacaaggtggacgccttagtggttcata

SEQ ID NO: 3834 - DNA, 84 bp, Artificial Sequence
  Synthetic
tcaccagcagactttacgcagcttagctcttaaacctgctcttcgccctcccgcccaacaaggtggacgccttagtggttcata

SEQ ID NO: 3835 - DNA, 84 bp, Artificial Sequence
  Synthetic
tcaccagcagactttacgcagcttagctcttaaacgagaggaggtcgagctgccccaacaaggtggacgccttagtggttcata

SEQ ID NO: 3836 - DNA, 84 bp, Artificial Sequence
  Synthetic
tcaccagcagactttacgcagcttagctcttaaaccctgaggggagcccgcgccccaacaaggtggacgccttagtggttcata

SEQ ID NO: 3837 - DNA, 84 bp, Artificial Sequence
  Synthetic
tcaccagcagactttacgcagcttagctcttaaactccaggtacggcttccctgccaacaaggtggacgccttagtggttcata

SEQ ID NO: 3838 - DNA, 84 bp, Artificial Sequence
  Synthetic
tcaccagcagactttacgcagcttagctcttaaacctgactgtccgggtccctcccaacaaggtggacgccttagtggttcata

SEQ ID NO: 3839 - DNA, 84 bp, Artificial Sequence
  Synthetic
tcaccagcagactttacgcagcttagctcttaaactacctggagggacccggacccaacaaggtggacgccttagtggttcata

SEQ ID NO: 3840 - DNA, 84 bp, Artificial Sequence
  Synthetic
tcaccagcagactttacgcagcttagctcttaaaccctcggctcggccctcagtccaacaaggtggacgccttagtggttcata

SEQ ID NO: 3841 - DNA, 84 bp, Artificial Sequence
  Synthetic
tcaccagcagactttacgcagcttagctcttaaaccagtaagaagccaggcgctccaacaaggtggacgccttagtggttcata

SEQ ID NO: 3842 - DNA, 84 bp, Artificial Sequence
  Synthetic
tcaccagcagactttacgcagcttagctcttaaacggcttcttactgcggcttcccaacaaggtggacgccttagtggttcata

SEQ ID NO: 3843 - DNA, 84 bp, Artificial Sequence
  Synthetic
tcaccagcagactttacgcagcttagctcttaaactactgagagcccaggtcgtccaacaaggtggacgccttagtggttcata

SEQ ID NO: 3844 - DNA, 84 bp, Artificial Sequence
  Synthetic
tcaccagcagactttacgcagcttagctcttaaactagagagagcgcgctctgcccaacaaggtggacgccttagtggttcata

SEQ ID NO: 3845 - DNA, 84 bp, Artificial Sequence
  Synthetic
tcaccagcagactttacgcagcttagctcttaaacttgcctcactttacgcaacccaacaaggtggacgccttagtggttcata

SEQ ID NO: 3846 - DNA, 84 bp, Artificial Sequence
  Synthetic
tcaccagcagactttacgcagcttagctcttaaaccagcgaagaggccatgttgccaacaaggtggacgccttagtggttcata

SEQ ID NO: 3847 - DNA, 84 bp, Artificial Sequence
  Synthetic
tcaccagcagactttacgcagcttagctcttaaacctctaggctttactccctcccaacaaggtggacgccttagtggttcata

SEQ ID NO: 3848 - DNA, 84 bp, Artificial Sequence
  Synthetic
tcaccagcagactttacgcagcttagctcttaaacgtctcctctctaggctttaccaacaaggtggacgccttagtggttcata

SEQ ID NO: 3849 - DNA, 84 bp, Artificial Sequence
  Synthetic
tcaccagcagactttacgcagcttagctcttaaactcagaggggaagccatcctccaacaaggtggacgccttagtggttcata

SEQ ID NO: 3850 - DNA, 84 bp, Artificial Sequence
  Synthetic
tcaccagcagactttacgcagcttagctcttaaaccgtccctcagaggggaagcccaacaaggtggacgccttagtggttcata

SEQ ID NO: 3851 - DNA, 84 bp, Artificial Sequence
  Synthetic
tcaccagcagactttacgcagcttagctcttaaacctctgagggacgaggaggaccaacaaggtggacgccttagtggttcata

SEQ ID NO: 3852 - DNA, 84 bp, Artificial Sequence
  Synthetic
tcaccagcagactttacgcagcttagctcttaaaccaggtcgcgctgggtccggccaacaaggtggacgccttagtggttcata

SEQ ID NO: 3853 - DNA, 84 bp, Artificial Sequence
  Synthetic
tcaccagcagactttacgcagcttagctcttaaacttgcccagaggagccgaccccaacaaggtggacgccttagtggttcata

SEQ ID NO: 3854 - DNA, 84 bp, Artificial Sequence
  Synthetic
tcaccagcagactttacgcagcttagctcttaaacttcctcaggcgtctccggaccaacaaggtggacgccttagtggttcata

SEQ ID NO: 3855 - DNA, 84 bp, Artificial Sequence
  Synthetic
tcaccagcagactttacgcagcttagctcttaaacccgccaccctcggccggctccaacaaggtggacgccttagtggttcata

SEQ ID NO: 3856 - DNA, 84 bp, Artificial Sequence
  Synthetic
tcaccagcagactttacgcagcttagctcttaaacccctttctctcggccgcctccaacaaggtggacgccttagtggttcata

SEQ ID NO: 3857 - DNA, 84 bp, Artificial Sequence
  Synthetic
tcaccagcagactttacgcagcttagctcttaaacccaccctcggccggctgcgccaacaaggtggacgccttagtggttcata

SEQ ID NO: 3858 - DNA, 84 bp, Artificial Sequence
  Synthetic
tcaccagcagactttacgcagcttagctcttaaacccctggcctcggcggaccgccaacaaggtggacgccttagtggttcata

SEQ ID NO: 3859 - DNA, 84 bp, Artificial Sequence
  Synthetic
tcaccagcagactttacgcagcttagctcttaaacaaaatggctcctgcagcagccaacaaggtggacgccttagtggttcata

SEQ ID NO: 3860 - DNA, 84 bp, Artificial Sequence
  Synthetic
tcaccagcagactttacgcagcttagctcttaaacctcatcccggctccattcaccaacaaggtggacgccttagtggttcata

SEQ ID NO: 3861 - DNA, 84 bp, Artificial Sequence
  Synthetic
tcaccagcagactttacgcagcttagctcttaaactactctaccggccgcccttccaacaaggtggacgccttagtggttcata

SEQ ID NO: 3862 - DNA, 84 bp, Artificial Sequence
  Synthetic
tcaccagcagactttacgcagcttagctcttaaacataccgctccctatatcctccaacaaggtggacgccttagtggttcata

SEQ ID NO: 3863 - DNA, 84 bp, Artificial Sequence
  Synthetic
tcaccagcagactttacgcagcttagctcttaaaccaggcgttttctgccccatccaacaaggtggacgccttagtggttcata

SEQ ID NO: 3864 - DNA, 84 bp, Artificial Sequence
  Synthetic
tcaccagcagactttacgcagcttagctcttaaaccctggagccgcacactctcccaacaaggtggacgccttagtggttcata

SEQ ID NO: 3865 - DNA, 84 bp, Artificial Sequence
  Synthetic
tcaccagcagactttacgcagcttagctcttaaaccgtgagcccacctggagccccaacaaggtggacgccttagtggttcata

SEQ ID NO: 3866 - DNA, 84 bp, Artificial Sequence
  Synthetic
tcaccagcagactttacgcagcttagctcttaaaccatatgactcaccgcgtgaccaacaaggtggacgccttagtggttcata

SEQ ID NO: 3867 - DNA, 84 bp, Artificial Sequence
  Synthetic
tcaccagcagactttacgcagcttagctcttaaacctgtcaagagacattgcggccaacaaggtggacgccttagtggttcata

SEQ ID NO: 3868 - DNA, 84 bp, Artificial Sequence
  Synthetic
tcaccagcagactttacgcagcttagctcttaaacctggggtcgggagtctccaccaacaaggtggacgccttagtggttcata

SEQ ID NO: 3869 - DNA, 84 bp, Artificial Sequence
  Synthetic
tcaccagcagactttacgcagcttagctcttaaacccgccgctgtcaagagacaccaacaaggtggacgccttagtggttcata

SEQ ID NO: 3870 - DNA, 84 bp, Artificial Sequence
  Synthetic
tcaccagcagactttacgcagcttagctcttaaacgagctcccgctccgaacctccaacaaggtggacgccttagtggttcata

SEQ ID NO: 3871 - DNA, 84 bp, Artificial Sequence
  Synthetic
tcaccagcagactttacgcagcttagctcttaaactaccgtccgcgagcccgagccaacaaggtggacgccttagtggttcata

SEQ ID NO: 3872 - DNA, 84 bp, Artificial Sequence
  Synthetic
tcaccagcagactttacgcagcttagctcttaaacccataccgtccgcgagcccccaacaaggtggacgccttagtggttcata

SEQ ID NO: 3873 - DNA, 84 bp, Artificial Sequence
  Synthetic
tcaccagcagactttacgcagcttagctcttaaacccgccgtgagcgagcacgtccaacaaggtggacgccttagtggttcata

SEQ ID NO: 3874 - DNA, 84 bp, Artificial Sequence
  Synthetic
tcaccagcagactttacgcagcttagctcttaaacgatcccagctcggtctccgccaacaaggtggacgccttagtggttcata

SEQ ID NO: 3875 - DNA, 84 bp, Artificial Sequence
  Synthetic
tcaccagcagactttacgcagcttagctcttaaacccgtgagcgagcacgtacgccaacaaggtggacgccttagtggttcata

SEQ ID NO: 3876 - DNA, 84 bp, Artificial Sequence
  Synthetic
tcaccagcagactttacgcagcttagctcttaaacgtgagaggcgcccgcccggccaacaaggtggacgccttagtggttcata

SEQ ID NO: 3877 - DNA, 84 bp, Artificial Sequence
  Synthetic
tcaccagcagactttacgcagcttagctcttaaacgttggcttccttggcggcgccaacaaggtggacgccttagtggttcata

SEQ ID NO: 3878 - DNA, 84 bp, Artificial Sequence
  Synthetic
tcaccagcagactttacgcagcttagctcttaaacccgcgagcgctcccggtgaccaacaaggtggacgccttagtggttcata

SEQ ID NO: 3879 - DNA, 84 bp, Artificial Sequence
  Synthetic
tcaccagcagactttacgcagcttagctcttaaactagtggagcgcaggggaggccaacaaggtggacgccttagtggttcata

SEQ ID NO: 3880 - DNA, 84 bp, Artificial Sequence
  Synthetic
tcaccagcagactttacgcagcttagctcttaaactcagccggagagcagcggcccaacaaggtggacgccttagtggttcata

SEQ ID NO: 3881 - DNA, 84 bp, Artificial Sequence
  Synthetic
tcaccagcagactttacgcagcttagctcttaaacgggtagaccccgctgacccccaacaaggtggacgccttagtggttcata

SEQ ID NO: 3882 - DNA, 84 bp, Artificial Sequence
  Synthetic
tcaccagcagactttacgcagcttagctcttaaacccatcttgtcgcggacccgccaacaaggtggacgccttagtggttcata

SEQ ID NO: 3883 - DNA, 84 bp, Artificial Sequence
  Synthetic
tcaccagcagactttacgcagcttagctcttaaacagtagatcgcgctcgaagcccaacaaggtggacgccttagtggttcata

SEQ ID NO: 3884 - DNA, 84 bp, Artificial Sequence
  Synthetic
tcaccagcagactttacgcagcttagctcttaaacaccggggcttcgagcgcgaccaacaaggtggacgccttagtggttcata

SEQ ID NO: 3885 - DNA, 84 bp, Artificial Sequence
  Synthetic
tcaccagcagactttacgcagcttagctcttaaacctgctgacaggcaagactcccaacaaggtggacgccttagtggttcata

SEQ ID NO: 3886 - DNA, 84 bp, Artificial Sequence
  Synthetic
tcaccagcagactttacgcagcttagctcttaaacctttggacggggcaaactaccaacaaggtggacgccttagtggttcata

SEQ ID NO: 3887 - DNA, 84 bp, Artificial Sequence
  Synthetic
tcaccagcagactttacgcagcttagctcttaaacccccgtagcgaggctgcaaccaacaaggtggacgccttagtggttcata

SEQ ID NO: 3888 - DNA, 84 bp, Artificial Sequence
  Synthetic
tcaccagcagactttacgcagcttagctcttaaacttggggtgccgagtggcagccaacaaggtggacgccttagtggttcata

SEQ ID NO: 3889 - DNA, 84 bp, Artificial Sequence
  Synthetic
tcaccagcagactttacgcagcttagctcttaaactcaaggaccctcaccgcccccaacaaggtggacgccttagtggttcata

SEQ ID NO: 3890 - DNA, 84 bp, Artificial Sequence
  Synthetic
tcaccagcagactttacgcagcttagctcttaaacttagggtcttggcgggaacccaacaaggtggacgccttagtggttcata

SEQ ID NO: 3891 - DNA, 84 bp, Artificial Sequence
  Synthetic
tcaccagcagactttacgcagcttagctcttaaacttagggtctctggccctgtccaacaaggtggacgccttagtggttcata

SEQ ID NO: 3892 - DNA, 84 bp, Artificial Sequence
  Synthetic
tcaccagcagactttacgcagcttagctcttaaaccgatttgggctccagcgggccaacaaggtggacgccttagtggttcata

SEQ ID NO: 3893 - DNA, 84 bp, Artificial Sequence
  Synthetic
tcaccagcagactttacgcagcttagctcttaaacccgcgatttgggctccagcccaacaaggtggacgccttagtggttcata

SEQ ID NO: 3894 - DNA, 84 bp, Artificial Sequence
  Synthetic
tcaccagcagactttacgcagcttagctcttaaacgactctgggatcggcggcgccaacaaggtggacgccttagtggttcata

SEQ ID NO: 3895 - DNA, 84 bp, Artificial Sequence
  Synthetic
tcaccagcagactttacgcagcttagctcttaaactgaccgcgccgccacttccccaacaaggtggacgccttagtggttcata

SEQ ID NO: 3896 - DNA, 84 bp, Artificial Sequence
  Synthetic
tcaccagcagactttacgcagcttagctcttaaacatcccagagtccgggacccccaacaaggtggacgccttagtggttcata

SEQ ID NO: 3897 - DNA, 84 bp, Artificial Sequence
  Synthetic
tcaccagcagactttacgcagcttagctcttaaactgatgccccgcgccccggcccaacaaggtggacgccttagtggttcata

SEQ ID NO: 3898 - DNA, 84 bp, Artificial Sequence
  Synthetic
tcaccagcagactttacgcagcttagctcttaaaccagagacacgttgcaggccccaacaaggtggacgccttagtggttcata

SEQ ID NO: 3899 - DNA, 84 bp, Artificial Sequence
  Synthetic
tcaccagcagactttacgcagcttagctcttaaacgtcgggactcgagcgcgacccaacaaggtggacgccttagtggttcata

SEQ ID NO: 3900 - DNA, 84 bp, Artificial Sequence
  Synthetic
tcaccagcagactttacgcagcttagctcttaaacaccgtattgaggacttttcccaacaaggtggacgccttagtggttcata

SEQ ID NO: 3901 - DNA, 84 bp, Artificial Sequence
  Synthetic
tcaccagcagactttacgcagcttagctcttaaactattgaggacttttcgttcccaacaaggtggacgccttagtggttcata

SEQ ID NO: 3902 - DNA, 84 bp, Artificial Sequence
  Synthetic
tcaccagcagactttacgcagcttagctcttaaacgtctcaatgttgagcccaaccaacaaggtggacgccttagtggttcata

SEQ ID NO: 3903 - DNA, 84 bp, Artificial Sequence
  Synthetic
tcaccagcagactttacgcagcttagctcttaaactcgcgtcctccgtgtgaagccaacaaggtggacgccttagtggttcata

SEQ ID NO: 3904 - DNA, 84 bp, Artificial Sequence
  Synthetic
tcaccagcagactttacgcagcttagctcttaaaccagaggcctctcaatcctcccaacaaggtggacgccttagtggttcata

SEQ ID NO: 3905 - DNA, 84 bp, Artificial Sequence
  Synthetic
tcaccagcagactttacgcagcttagctcttaaactccatgatcttcgcatagaccaacaaggtggacgccttagtggttcata

SEQ ID NO: 3906 - DNA, 84 bp, Artificial Sequence
  Synthetic
tcaccagcagactttacgcagcttagctcttaaacgtcctccgcggcttcgcctccaacaaggtggacgccttagtggttcata

SEQ ID NO: 3907 - DNA, 84 bp, Artificial Sequence
  Synthetic
tcaccagcagactttacgcagcttagctcttaaacccgcggcttcgcctgctcgccaacaaggtggacgccttagtggttcata

SEQ ID NO: 3908 - DNA, 84 bp, Artificial Sequence
  Synthetic
tcaccagcagactttacgcagcttagctcttaaaccggcttcgcctgctcgctcccaacaaggtggacgccttagtggttcata

SEQ ID NO: 3909 - DNA, 84 bp, Artificial Sequence
  Synthetic
tcaccagcagactttacgcagcttagctcttaaacgtttctaactcagtggcgtccaacaaggtggacgccttagtggttcata

SEQ ID NO: 3910 - DNA, 84 bp, Artificial Sequence
  Synthetic
tcaccagcagactttacgcagcttagctcttaaacccagtttctaactcagtggccaacaaggtggacgccttagtggttcata

SEQ ID NO: 3911 - DNA, 84 bp, Artificial Sequence
  Synthetic
tcaccagcagactttacgcagcttagctcttaaactgtagattctcgctgctgcccaacaaggtggacgccttagtggttcata

SEQ ID NO: 3912 - DNA, 84 bp, Artificial Sequence
  Synthetic
tcaccagcagactttacgcagcttagctcttaaactagtgggagctaggcagatccaacaaggtggacgccttagtggttcata

SEQ ID NO: 3913 - DNA, 84 bp, Artificial Sequence
  Synthetic
tcaccagcagactttacgcagcttagctcttaaaccagttctcccgtgagagggccaacaaggtggacgccttagtggttcata

SEQ ID NO: 3914 - DNA, 84 bp, Artificial Sequence
  Synthetic
tcaccagcagactttacgcagcttagctcttaaaccgaaggccctctcacgggaccaacaaggtggacgccttagtggttcata

SEQ ID NO: 3915 - DNA, 84 bp, Artificial Sequence
  Synthetic
tcaccagcagactttacgcagcttagctcttaaacgtctctagtagtgcagcttccaacaaggtggacgccttagtggttcata

SEQ ID NO: 3916 - DNA, 84 bp, Artificial Sequence
  Synthetic
tcaccagcagactttacgcagcttagctcttaaaccattcatttctaccggtctccaacaaggtggacgccttagtggttcata

SEQ ID NO: 3917 - DNA, 84 bp, Artificial Sequence
  Synthetic
tcaccagcagactttacgcagcttagctcttaaacccgcaaggcttcgccgtcaccaacaaggtggacgccttagtggttcata

SEQ ID NO: 3918 - DNA, 84 bp, Artificial Sequence
  Synthetic
tcaccagcagactttacgcagcttagctcttaaacctgcttgcagctagctacgccaacaaggtggacgccttagtggttcata

SEQ ID NO: 3919 - DNA, 84 bp, Artificial Sequence
  Synthetic
tcaccagcagactttacgcagcttagctcttaaacgcctctgcttgcagctagcccaacaaggtggacgccttagtggttcata

SEQ ID NO: 3920 - DNA, 84 bp, Artificial Sequence
  Synthetic
tcaccagcagactttacgcagcttagctcttaaaccgcaggctgtgcctcactaccaacaaggtggacgccttagtggttcata

SEQ ID NO: 3921 - DNA, 84 bp, Artificial Sequence
  Synthetic
tcaccagcagactttacgcagcttagctcttaaacctactacagcccacacggtccaacaaggtggacgccttagtggttcata

SEQ ID NO: 3922 - DNA, 84 bp, Artificial Sequence
  Synthetic
tcaccagcagactttacgcagcttagctcttaaacacacggtgcggccggaaccccaacaaggtggacgccttagtggttcata

SEQ ID NO: 3923 - DNA, 84 bp, Artificial Sequence
  Synthetic
tcaccagcagactttacgcagcttagctcttaaaccccgctactacagcccacaccaacaaggtggacgccttagtggttcata

SEQ ID NO: 3924 - DNA, 84 bp, Artificial Sequence
  Synthetic
tcaccagcagactttacgcagcttagctcttaaacgtcagaaccagcaaccgctccaacaaggtggacgccttagtggttcata

SEQ ID NO: 3925 - DNA, 84 bp, Artificial Sequence
  Synthetic
tcaccagcagactttacgcagcttagctcttaaacctggaaatggcgtccgggcccaacaaggtggacgccttagtggttcata

SEQ ID NO: 3926 - DNA, 84 bp, Artificial Sequence
  Synthetic
tcaccagcagactttacgcagcttagctcttaaacttcaggtgcccgggatgccccaacaaggtggacgccttagtggttcata

SEQ ID NO: 3927 - DNA, 84 bp, Artificial Sequence
  Synthetic
tcaccagcagactttacgcagcttagctcttaaacgccggagtagctctgagcgccaacaaggtggacgccttagtggttcata

SEQ ID NO: 3928 - DNA, 84 bp, Artificial Sequence
  Synthetic
tcaccagcagactttacgcagcttagctcttaaacacccgattaaggctcccgcccaacaaggtggacgccttagtggttcata

SEQ ID NO: 3929 - DNA, 84 bp, Artificial Sequence
  Synthetic
tcaccagcagactttacgcagcttagctcttaaaccacagccggcgctcagagcccaacaaggtggacgccttagtggttcata

SEQ ID NO: 3930 - DNA, 84 bp, Artificial Sequence
  Synthetic
tcaccagcagactttacgcagcttagctcttaaactgcgagttgctgtgcgtttccaacaaggtggacgccttagtggttcata

SEQ ID NO: 3931 - DNA, 84 bp, Artificial Sequence
  Synthetic
tcaccagcagactttacgcagcttagctcttaaactgtgtgactctggccttctccaacaaggtggacgccttagtggttcata

SEQ ID NO: 3932 - DNA, 84 bp, Artificial Sequence
  Synthetic
tcaccagcagactttacgcagcttagctcttaaaccggtcggagccatttcgccccaacaaggtggacgccttagtggttcata

SEQ ID NO: 3933 - DNA, 84 bp, Artificial Sequence
  Synthetic
tcaccagcagactttacgcagcttagctcttaaaccgctgtcaggttactccatccaacaaggtggacgccttagtggttcata

SEQ ID NO: 3934 - DNA, 84 bp, Artificial Sequence
  Synthetic
tcaccagcagactttacgcagcttagctcttaaactggcgttgggccgcagttgccaacaaggtggacgccttagtggttcata

SEQ ID NO: 3935 - DNA, 84 bp, Artificial Sequence
  Synthetic
tcaccagcagactttacgcagcttagctcttaaaccgtccccgctgtcaggttaccaacaaggtggacgccttagtggttcata

SEQ ID NO: 3936 - DNA, 84 bp, Artificial Sequence
  Synthetic
tcaccagcagactttacgcagcttagctcttaaaccacctgggtccggcagctgccaacaaggtggacgccttagtggttcata

SEQ ID NO: 3937 - DNA, 84 bp, Artificial Sequence
  Synthetic
tcaccagcagactttacgcagcttagctcttaaacccgtccccgcaaagccgcgccaacaaggtggacgccttagtggttcata

SEQ ID NO: 3938 - DNA, 84 bp, Artificial Sequence
  Synthetic
tcaccagcagactttacgcagcttagctcttaaacttgacctccggtggctcccccaacaaggtggacgccttagtggttcata

SEQ ID NO: 3939 - DNA, 84 bp, Artificial Sequence
  Synthetic
tcaccagcagactttacgcagcttagctcttaaaccagggtttggcgccaaacgccaacaaggtggacgccttagtggttcata

SEQ ID NO: 3940 - DNA, 84 bp, Artificial Sequence
  Synthetic
tcaccagcagactttacgcagcttagctcttaaactgttctaggcccgagttagccaacaaggtggacgccttagtggttcata

SEQ ID NO: 3941 - DNA, 84 bp, Artificial Sequence
  Synthetic
tcaccagcagactttacgcagcttagctcttaaacgagttagaatcctgtcagcccaacaaggtggacgccttagtggttcata

SEQ ID NO: 3942 - DNA, 84 bp, Artificial Sequence
  Synthetic
tcaccagcagactttacgcagcttagctcttaaaccagactgaccgggcccgggccaacaaggtggacgccttagtggttcata

SEQ ID NO: 3943 - DNA, 84 bp, Artificial Sequence
  Synthetic
tcaccagcagactttacgcagcttagctcttaaaccctctccgctcacagctccccaacaaggtggacgccttagtggttcata

SEQ ID NO: 3944 - DNA, 84 bp, Artificial Sequence
  Synthetic
tcaccagcagactttacgcagcttagctcttaaaccctcagactgaccgggcccccaacaaggtggacgccttagtggttcata

SEQ ID NO: 3945 - DNA, 84 bp, Artificial Sequence
  Synthetic
tcaccagcagactttacgcagcttagctcttaaacccgagatgccggcgcgtacccaacaaggtggacgccttagtggttcata

SEQ ID NO: 3946 - DNA, 84 bp, Artificial Sequence
  Synthetic
tcaccagcagactttacgcagcttagctcttaaaccgtctgctgaagcctccgaccaacaaggtggacgccttagtggttcata

SEQ ID NO: 3947 - DNA, 84 bp, Artificial Sequence
  Synthetic
tcaccagcagactttacgcagcttagctcttaaacacactggccgtcccggccaccaacaaggtggacgccttagtggttcata

SEQ ID NO: 3948 - DNA, 84 bp, Artificial Sequence
  Synthetic
tcaccagcagactttacgcagcttagctcttaaacctggagccctcgaggagtgccaacaaggtggacgccttagtggttcata

SEQ ID NO: 3949 - DNA, 84 bp, Artificial Sequence
  Synthetic
tcaccagcagactttacgcagcttagctcttaaactcgaggagtggggccttggccaacaaggtggacgccttagtggttcata

SEQ ID NO: 3950 - DNA, 84 bp, Artificial Sequence
  Synthetic
tcaccagcagactttacgcagcttagctcttaaacaccaggccctccagcggggccaacaaggtggacgccttagtggttcata

SEQ ID NO: 3951 - DNA, 84 bp, Artificial Sequence
  Synthetic
tcaccagcagactttacgcagcttagctcttaaacccagctgcttcgagggctgccaacaaggtggacgccttagtggttcata

SEQ ID NO: 3952 - DNA, 84 bp, Artificial Sequence
  Synthetic
tcaccagcagactttacgcagcttagctcttaaacgacggggcagcgggagtggccaacaaggtggacgccttagtggttcata

SEQ ID NO: 3953 - DNA, 84 bp, Artificial Sequence
  Synthetic
tcaccagcagactttacgcagcttagctcttaaaccccgacggacgggaccggcccaacaaggtggacgccttagtggttcata

SEQ ID NO: 3954 - DNA, 84 bp, Artificial Sequence
  Synthetic
tcaccagcagactttacgcagcttagctcttaaaccctctgatctccggggtgcccaacaaggtggacgccttagtggttcata

SEQ ID NO: 3955 - DNA, 84 bp, Artificial Sequence
  Synthetic
tcaccagcagactttacgcagcttagctcttaaacccaatcctggaggctatccccaacaaggtggacgccttagtggttcata

SEQ ID NO: 3956 - DNA, 84 bp, Artificial Sequence
  Synthetic
tcaccagcagactttacgcagcttagctcttaaacctgatctccggggtgcggaccaacaaggtggacgccttagtggttcata

SEQ ID NO: 3957 - DNA, 84 bp, Artificial Sequence
  Synthetic
tcaccagcagactttacgcagcttagctcttaaacatggatccaccacgagcgtccaacaaggtggacgccttagtggttcata

SEQ ID NO: 3958 - DNA, 84 bp, Artificial Sequence
  Synthetic
tcaccagcagactttacgcagcttagctcttaaacctggctggcccatctggtgccaacaaggtggacgccttagtggttcata

SEQ ID NO: 3959 - DNA, 84 bp, Artificial Sequence
  Synthetic
tcaccagcagactttacgcagcttagctcttaaacacttgagccctcggaagaaccaacaaggtggacgccttagtggttcata

SEQ ID NO: 3960 - DNA, 84 bp, Artificial Sequence
  Synthetic
tcaccagcagactttacgcagcttagctcttaaaccaccaggagtcgcaacatgccaacaaggtggacgccttagtggttcata

SEQ ID NO: 3961 - DNA, 84 bp, Artificial Sequence
  Synthetic
tcaccagcagactttacgcagcttagctcttaaaccacagtccgcagcgcgcagccaacaaggtggacgccttagtggttcata

SEQ ID NO: 3962 - DNA, 84 bp, Artificial Sequence
  Synthetic
tcaccagcagactttacgcagcttagctcttaaacctgcctcgggccgagaagcccaacaaggtggacgccttagtggttcata

SEQ ID NO: 3963 - DNA, 84 bp, Artificial Sequence
  Synthetic
tcaccagcagactttacgcagcttagctcttaaacctaaactactgccatcctgccaacaaggtggacgccttagtggttcata

SEQ ID NO: 3964 - DNA, 84 bp, Artificial Sequence
  Synthetic
tcaccagcagactttacgcagcttagctcttaaactgattattgtcaggtactgccaacaaggtggacgccttagtggttcata

SEQ ID NO: 3965 - DNA, 84 bp, Artificial Sequence
  Synthetic
tcaccagcagactttacgcagcttagctcttaaacgggcgagtttcctgtgaccccaacaaggtggacgccttagtggttcata

SEQ ID NO: 3966 - DNA, 84 bp, Artificial Sequence
  Synthetic
tcaccagcagactttacgcagcttagctcttaaacgcggtagtagcctggctttccaacaaggtggacgccttagtggttcata

SEQ ID NO: 3967 - DNA, 84 bp, Artificial Sequence
  Synthetic
tcaccagcagactttacgcagcttagctcttaaacctgtcttggtacctgcggtccaacaaggtggacgccttagtggttcata

SEQ ID NO: 3968 - DNA, 84 bp, Artificial Sequence
  Synthetic
tcaccagcagactttacgcagcttagctcttaaactcggtttcctgttccggagccaacaaggtggacgccttagtggttcata

SEQ ID NO: 3969 - DNA, 84 bp, Artificial Sequence
  Synthetic
tcaccagcagactttacgcagcttagctcttaaaccgcgctgtcaagccctgttccaacaaggtggacgccttagtggttcata

SEQ ID NO: 3970 - DNA, 84 bp, Artificial Sequence
  Synthetic
tcaccagcagactttacgcagcttagctcttaaacggtcaccccgcggtttgtcccaacaaggtggacgccttagtggttcata

SEQ ID NO: 3971 - DNA, 84 bp, Artificial Sequence
  Synthetic
tcaccagcagactttacgcagcttagctcttaaacccaactcccgccactgtaaccaacaaggtggacgccttagtggttcata

SEQ ID NO: 3972 - DNA, 84 bp, Artificial Sequence
  Synthetic
tcaccagcagactttacgcagcttagctcttaaaccttcccccggtggtctcctccaacaaggtggacgccttagtggttcata

SEQ ID NO: 3973 - DNA, 84 bp, Artificial Sequence
  Synthetic
tcaccagcagactttacgcagcttagctcttaaacgtggtctcctcgctcgcctccaacaaggtggacgccttagtggttcata

SEQ ID NO: 3974 - DNA, 84 bp, Artificial Sequence
  Synthetic
tcaccagcagactttacgcagcttagctcttaaacccggtggtctcctcgctcgccaacaaggtggacgccttagtggttcata

SEQ ID NO: 3975 - DNA, 84 bp, Artificial Sequence
  Synthetic
tcaccagcagactttacgcagcttagctcttaaacccgcctgtcacccgggccgccaacaaggtggacgccttagtggttcata

SEQ ID NO: 3976 - DNA, 84 bp, Artificial Sequence
  Synthetic
tcaccagcagactttacgcagcttagctcttaaacggactttgcaggcagcggcccaacaaggtggacgccttagtggttcata

SEQ ID NO: 3977 - DNA, 84 bp, Artificial Sequence
  Synthetic
tcaccagcagactttacgcagcttagctcttaaactcgccgaggcctgccgccaccaacaaggtggacgccttagtggttcata

SEQ ID NO: 3978 - DNA, 84 bp, Artificial Sequence
  Synthetic
tcaccagcagactttacgcagcttagctcttaaacccttccaaagacgtttcagccaacaaggtggacgccttagtggttcata

SEQ ID NO: 3979 - DNA, 84 bp, Artificial Sequence
  Synthetic
tcaccagcagactttacgcagcttagctcttaaactcgatctccgacccgctgcccaacaaggtggacgccttagtggttcata

SEQ ID NO: 3980 - DNA, 84 bp, Artificial Sequence
  Synthetic
tcaccagcagactttacgcagcttagctcttaaacccttcctccttccaaagacccaacaaggtggacgccttagtggttcata

SEQ ID NO: 3981 - DNA, 84 bp, Artificial Sequence
  Synthetic
tcaccagcagactttacgcagcttagctcttaaactagcagagccaccagagatccaacaaggtggacgccttagtggttcata

SEQ ID NO: 3982 - DNA, 84 bp, Artificial Sequence
  Synthetic
tcaccagcagactttacgcagcttagctcttaaaccatttctgcgccgccgtagccaacaaggtggacgccttagtggttcata

SEQ ID NO: 3983 - DNA, 84 bp, Artificial Sequence
  Synthetic
tcaccagcagactttacgcagcttagctcttaaacccgtagcagagccaccagaccaacaaggtggacgccttagtggttcata

SEQ ID NO: 3984 - DNA, 84 bp, Artificial Sequence
  Synthetic
tcaccagcagactttacgcagcttagctcttaaacctctgcagaatcttggtggccaacaaggtggacgccttagtggttcata

SEQ ID NO: 3985 - DNA, 84 bp, Artificial Sequence
  Synthetic
tcaccagcagactttacgcagcttagctcttaaacgcaacttctcccgccactcccaacaaggtggacgccttagtggttcata

SEQ ID NO: 3986 - DNA, 84 bp, Artificial Sequence
  Synthetic
tcaccagcagactttacgcagcttagctcttaaacctctttcaactgccacgcaccaacaaggtggacgccttagtggttcata

SEQ ID NO: 3987 - DNA, 84 bp, Artificial Sequence
  Synthetic
tcaccagcagactttacgcagcttagctcttaaacgaccgacctcttcctcgctccaacaaggtggacgccttagtggttcata

SEQ ID NO: 3988 - DNA, 84 bp, Artificial Sequence
  Synthetic
tcaccagcagactttacgcagcttagctcttaaacacctcttcctcgcttccggccaacaaggtggacgccttagtggttcata

SEQ ID NO: 3989 - DNA, 84 bp, Artificial Sequence
  Synthetic
tcaccagcagactttacgcagcttagctcttaaactcccgggtccaacccgcgcccaacaaggtggacgccttagtggttcata

SEQ ID NO: 3990 - DNA, 84 bp, Artificial Sequence
  Synthetic
tcaccagcagactttacgcagcttagctcttaaacccgaggccacagtccctagccaacaaggtggacgccttagtggttcata

SEQ ID NO: 3991 - DNA, 84 bp, Artificial Sequence
  Synthetic
tcaccagcagactttacgcagcttagctcttaaaccggggtgggcgcggttctcccaacaaggtggacgccttagtggttcata

SEQ ID NO: 3992 - DNA, 84 bp, Artificial Sequence
  Synthetic
tcaccagcagactttacgcagcttagctcttaaacgagatccctccgcttccgcccaacaaggtggacgccttagtggttcata

SEQ ID NO: 3993 - DNA, 84 bp, Artificial Sequence
  Synthetic
tcaccagcagactttacgcagcttagctcttaaacactctcgcccgctctctctccaacaaggtggacgccttagtggttcata

SEQ ID NO: 3994 - DNA, 84 bp, Artificial Sequence
  Synthetic
tcaccagcagactttacgcagcttagctcttaaacccttacaggctagcggtagccaacaaggtggacgccttagtggttcata

SEQ ID NO: 3995 - DNA, 84 bp, Artificial Sequence
  Synthetic
tcaccagcagactttacgcagcttagctcttaaacaatcctccttacaggctagccaacaaggtggacgccttagtggttcata

SEQ ID NO: 3996 - DNA, 84 bp, Artificial Sequence
  Synthetic
tcaccagcagactttacgcagcttagctcttaaacggaccctggacgctgccgtccaacaaggtggacgccttagtggttcata

SEQ ID NO: 3997 - DNA, 84 bp, Artificial Sequence
  Synthetic
tcaccagcagactttacgcagcttagctcttaaactcctgacgcggccggagcgccaacaaggtggacgccttagtggttcata

SEQ ID NO: 3998 - DNA, 84 bp, Artificial Sequence
  Synthetic
tcaccagcagactttacgcagcttagctcttaaactcacttaccctgggcctcaccaacaaggtggacgccttagtggttcata

SEQ ID NO: 3999 - DNA, 84 bp, Artificial Sequence
  Synthetic
tcaccagcagactttacgcagcttagctcttaaacttccccacactgcatcgcgccaacaaggtggacgccttagtggttcata

SEQ ID NO: 4000 - DNA, 84 bp, Artificial Sequence
  Synthetic
tcaccagcagactttacgcagcttagctcttaaaccacactgcatcgcgcagcgccaacaaggtggacgccttagtggttcata

SEQ ID NO: 4001 - DNA, 84 bp, Artificial Sequence
  Synthetic
tcaccagcagactttacgcagcttagctcttaaacaccctcccggctggtgttaccaacaaggtggacgccttagtggttcata

SEQ ID NO: 4002 - DNA, 84 bp, Artificial Sequence
  Synthetic
tcaccagcagactttacgcagcttagctcttaaaccgatccctctgcagtctttccaacaaggtggacgccttagtggttcata

SEQ ID NO: 4003 - DNA, 84 bp, Artificial Sequence
  Synthetic
tcaccagcagactttacgcagcttagctcttaaaccctcgatccctctgcagtcccaacaaggtggacgccttagtggttcata

SEQ ID NO: 4004 - DNA, 84 bp, Artificial Sequence
  Synthetic
tcaccagcagactttacgcagcttagctcttaaacccgaggctagcatctggacccaacaaggtggacgccttagtggttcata

SEQ ID NO: 4005 - DNA, 84 bp, Artificial Sequence
  Synthetic
tcaccagcagactttacgcagcttagctcttaaacttctcacttcatggcgccgccaacaaggtggacgccttagtggttcata

SEQ ID NO: 4006 - DNA, 84 bp, Artificial Sequence
  Synthetic
tcaccagcagactttacgcagcttagctcttaaaccgctatcactgctgctcccccaacaaggtggacgccttagtggttcata

SEQ ID NO: 4007 - DNA, 84 bp, Artificial Sequence
  Synthetic
tcaccagcagactttacgcagcttagctcttaaacttctctgggctcgacgaccccaacaaggtggacgccttagtggttcata

SEQ ID NO: 4008 - DNA, 84 bp, Artificial Sequence
  Synthetic
tcaccagcagactttacgcagcttagctcttaaacgttgggacaggcctttgggccaacaaggtggacgccttagtggttcata

SEQ ID NO: 4009 - DNA, 84 bp, Artificial Sequence
  Synthetic
tcaccagcagactttacgcagcttagctcttaaaccggcgggcctgtgggagcgccaacaaggtggacgccttagtggttcata

SEQ ID NO: 4010 - DNA, 84 bp, Artificial Sequence
  Synthetic
tcaccagcagactttacgcagcttagctcttaaacgaagctccctgttgtccacccaacaaggtggacgccttagtggttcata

SEQ ID NO: 4011 - DNA, 84 bp, Artificial Sequence
  Synthetic
tcaccagcagactttacgcagcttagctcttaaactcgagccggctgccctgacccaacaaggtggacgccttagtggttcata

SEQ ID NO: 4012 - DNA, 84 bp, Artificial Sequence
  Synthetic
tcaccagcagactttacgcagcttagctcttaaacctgctggagtacgagcgacccaacaaggtggacgccttagtggttcata

SEQ ID NO: 4013 - DNA, 84 bp, Artificial Sequence
  Synthetic
tcaccagcagactttacgcagcttagctcttaaactggcgccgctgctggagtaccaacaaggtggacgccttagtggttcata

SEQ ID NO: 4014 - DNA, 84 bp, Artificial Sequence
  Synthetic
tcaccagcagactttacgcagcttagctcttaaaccccactactgtgatctgtcccaacaaggtggacgccttagtggttcata

SEQ ID NO: 4015 - DNA, 84 bp, Artificial Sequence
  Synthetic
tcaccagcagactttacgcagcttagctcttaaacaccaaccacaccgcctcccccaacaaggtggacgccttagtggttcata

SEQ ID NO: 4016 - DNA, 84 bp, Artificial Sequence
  Synthetic
tcaccagcagactttacgcagcttagctcttaaacaccacaccgcctcccactaccaacaaggtggacgccttagtggttcata

SEQ ID NO: 4017 - DNA, 84 bp, Artificial Sequence
  Synthetic
tcaccagcagactttacgcagcttagctcttaaacattagtgccgtcccccactccaacaaggtggacgccttagtggttcata

SEQ ID NO: 4018 - DNA, 84 bp, Artificial Sequence
  Synthetic
tcaccagcagactttacgcagcttagctcttaaacccatgaggcggctgcgtccccaacaaggtggacgccttagtggttcata

SEQ ID NO: 4019 - DNA, 84 bp, Artificial Sequence
  Synthetic
tcaccagcagactttacgcagcttagctcttaaaccggttttccagtgggggacccaacaaggtggacgccttagtggttcata

SEQ ID NO: 4020 - DNA, 84 bp, Artificial Sequence
  Synthetic
tcaccagcagactttacgcagcttagctcttaaactggaacccagctcgacgggccaacaaggtggacgccttagtggttcata

SEQ ID NO: 4021 - DNA, 84 bp, Artificial Sequence
  Synthetic
tcaccagcagactttacgcagcttagctcttaaacccttggaacccagctcgacccaacaaggtggacgccttagtggttcata

SEQ ID NO: 4022 - DNA, 84 bp, Artificial Sequence
  Synthetic
tcaccagcagactttacgcagcttagctcttaaacccagccgccttggaacccaccaacaaggtggacgccttagtggttcata

SEQ ID NO: 4023 - DNA, 84 bp, Artificial Sequence
  Synthetic
tcaccagcagactttacgcagcttagctcttaaacaactctaagctccaagctcccaacaaggtggacgccttagtggttcata

SEQ ID NO: 4024 - DNA, 84 bp, Artificial Sequence
  Synthetic
tcaccagcagactttacgcagcttagctcttaaacgaaaccttcgggatgcctcccaacaaggtggacgccttagtggttcata

SEQ ID NO: 4025 - DNA, 84 bp, Artificial Sequence
  Synthetic
tcaccagcagactttacgcagcttagctcttaaacctgggcgggtctagctaacccaacaaggtggacgccttagtggttcata

SEQ ID NO: 4026 - DNA, 84 bp, Artificial Sequence
  Synthetic
tcaccagcagactttacgcagcttagctcttaaactgacagagctcaggggcggccaacaaggtggacgccttagtggttcata

SEQ ID NO: 4027 - DNA, 84 bp, Artificial Sequence
  Synthetic
tcaccagcagactttacgcagcttagctcttaaacgtgtgaggacacgatatgcccaacaaggtggacgccttagtggttcata

SEQ ID NO: 4028 - DNA, 84 bp, Artificial Sequence
  Synthetic
tcaccagcagactttacgcagcttagctcttaaaccagcatatcgtgtcctcacccaacaaggtggacgccttagtggttcata

SEQ ID NO: 4029 - DNA, 84 bp, Artificial Sequence
  Synthetic
tcaccagcagactttacgcagcttagctcttaaacctggcgctagtctgaccctccaacaaggtggacgccttagtggttcata

SEQ ID NO: 4030 - DNA, 84 bp, Artificial Sequence
  Synthetic
tcaccagcagactttacgcagcttagctcttaaactccttttgcctggcggaggccaacaaggtggacgccttagtggttcata

SEQ ID NO: 4031 - DNA, 84 bp, Artificial Sequence
  Synthetic
tcaccagcagactttacgcagcttagctcttaaactcagggacgctcgcgtaccccaacaaggtggacgccttagtggttcata

SEQ ID NO: 4032 - DNA, 84 bp, Artificial Sequence
  Synthetic
tcaccagcagactttacgcagcttagctcttaaactcagcggcccggggcagtcccaacaaggtggacgccttagtggttcata

SEQ ID NO: 4033 - DNA, 84 bp, Artificial Sequence
  Synthetic
tcaccagcagactttacgcagcttagctcttaaactctttcctaggtacaggacccaacaaggtggacgccttagtggttcata

SEQ ID NO: 4034 - DNA, 84 bp, Artificial Sequence
  Synthetic
tcaccagcagactttacgcagcttagctcttaaaccccgacactccctccaggaccaacaaggtggacgccttagtggttcata

SEQ ID NO: 4035 - DNA, 84 bp, Artificial Sequence
  Synthetic
tcaccagcagactttacgcagcttagctcttaaacccatactcacccgtggacgccaacaaggtggacgccttagtggttcata

SEQ ID NO: 4036 - DNA, 84 bp, Artificial Sequence
  Synthetic
tcaccagcagactttacgcagcttagctcttaaaccgggtgagtatggtggaacccaacaaggtggacgccttagtggttcata

SEQ ID NO: 4037 - DNA, 84 bp, Artificial Sequence
  Synthetic
tcaccagcagactttacgcagcttagctcttaaactactcacccgtggacgccaccaacaaggtggacgccttagtggttcata

SEQ ID NO: 4038 - DNA, 84 bp, Artificial Sequence
  Synthetic
tcaccagcagactttacgcagcttagctcttaaacttcaatttgcgcgggttccccaacaaggtggacgccttagtggttcata

SEQ ID NO: 4039 - DNA, 84 bp, Artificial Sequence
  Synthetic
tcaccagcagactttacgcagcttagctcttaaacgtgttctgcgttgccggccccaacaaggtggacgccttagtggttcata

SEQ ID NO: 4040 - DNA, 84 bp, Artificial Sequence
  Synthetic
tcaccagcagactttacgcagcttagctcttaaacgccgtgggtgctctggccaccaacaaggtggacgccttagtggttcata

SEQ ID NO: 4041 - DNA, 84 bp, Artificial Sequence
  Synthetic
tcaccagcagactttacgcagcttagctcttaaactccatcccgagccgcgggtccaacaaggtggacgccttagtggttcata

SEQ ID NO: 4042 - DNA, 84 bp, Artificial Sequence
  Synthetic
tcaccagcagactttacgcagcttagctcttaaactcccgagccgcgggtcccgccaacaaggtggacgccttagtggttcata

SEQ ID NO: 4043 - DNA, 84 bp, Artificial Sequence
  Synthetic
tcaccagcagactttacgcagcttagctcttaaaccgggtcccgctgctaggacccaacaaggtggacgccttagtggttcata

SEQ ID NO: 4044 - DNA, 84 bp, Artificial Sequence
  Synthetic
tcaccagcagactttacgcagcttagctcttaaaccgtttggcgctcggtccggccaacaaggtggacgccttagtggttcata

SEQ ID NO: 4045 - DNA, 84 bp, Artificial Sequence
  Synthetic
tcaccagcagactttacgcagcttagctcttaaacgggtatcgccgagcggggcccaacaaggtggacgccttagtggttcata

SEQ ID NO: 4046 - DNA, 84 bp, Artificial Sequence
  Synthetic
tcaccagcagactttacgcagcttagctcttaaacaccgggtgtcggacgcgacccaacaaggtggacgccttagtggttcata

SEQ ID NO: 4047 - DNA, 84 bp, Artificial Sequence
  Synthetic
tcaccagcagactttacgcagcttagctcttaaacacgtactctccccctccatccaacaaggtggacgccttagtggttcata

SEQ ID NO: 4048 - DNA, 84 bp, Artificial Sequence
  Synthetic
tcaccagcagactttacgcagcttagctcttaaaccctcaggctacacaagaggccaacaaggtggacgccttagtggttcata

SEQ ID NO: 4049 - DNA, 84 bp, Artificial Sequence
  Synthetic
tcaccagcagactttacgcagcttagctcttaaactccatgctaccgccgcctcccaacaaggtggacgccttagtggttcata

SEQ ID NO: 4050 - DNA, 84 bp, Artificial Sequence
  Synthetic
tcaccagcagactttacgcagcttagctcttaaacccttccctcggtgccctgtccaacaaggtggacgccttagtggttcata

SEQ ID NO: 4051 - DNA, 84 bp, Artificial Sequence
  Synthetic
tcaccagcagactttacgcagcttagctcttaaactcgcgtcctccttccctcgccaacaaggtggacgccttagtggttcata

SEQ ID NO: 4052 - DNA, 84 bp, Artificial Sequence
  Synthetic
tcaccagcagactttacgcagcttagctcttaaactccctcggtgccctgtcacccaacaaggtggacgccttagtggttcata

SEQ ID NO: 4053 - DNA, 84 bp, Artificial Sequence
  Synthetic
tcaccagcagactttacgcagcttagctcttaaacacgagtcggacatggccttccaacaaggtggacgccttagtggttcata

SEQ ID NO: 4054 - DNA, 84 bp, Artificial Sequence
  Synthetic
tcaccagcagactttacgcagcttagctcttaaacactcgtgggtcccgaactcccaacaaggtggacgccttagtggttcata

SEQ ID NO: 4055 - DNA, 84 bp, Artificial Sequence
  Synthetic
tcaccagcagactttacgcagcttagctcttaaactgtccgactcgtgggtcccccaacaaggtggacgccttagtggttcata

SEQ ID NO: 4056 - DNA, 84 bp, Artificial Sequence
  Synthetic
tcaccagcagactttacgcagcttagctcttaaacgtatgttgccgctgcgttgccaacaaggtggacgccttagtggttcata

SEQ ID NO: 4057 - DNA, 84 bp, Artificial Sequence
  Synthetic
tcaccagcagactttacgcagcttagctcttaaactatcgacgtggggcctccgccaacaaggtggacgccttagtggttcata

SEQ ID NO: 4058 - DNA, 84 bp, Artificial Sequence
  Synthetic
tcaccagcagactttacgcagcttagctcttaaaccctcctctgcgttcgacgcccaacaaggtggacgccttagtggttcata

SEQ ID NO: 4059 - DNA, 84 bp, Artificial Sequence
  Synthetic
tcaccagcagactttacgcagcttagctcttaaacctttgagccggtcgccctcccaacaaggtggacgccttagtggttcata

SEQ ID NO: 4060 - DNA, 84 bp, Artificial Sequence
  Synthetic
tcaccagcagactttacgcagcttagctcttaaacctgacgtgtcggccagaccccaacaaggtggacgccttagtggttcata

SEQ ID NO: 4061 - DNA, 84 bp, Artificial Sequence
  Synthetic
tcaccagcagactttacgcagcttagctcttaaacctgccgggcgaccgcgggaccaacaaggtggacgccttagtggttcata

SEQ ID NO: 4062 - DNA, 84 bp, Artificial Sequence
  Synthetic
tcaccagcagactttacgcagcttagctcttaaacgtagttttcgactttcccgccaacaaggtggacgccttagtggttcata

SEQ ID NO: 4063 - DNA, 84 bp, Artificial Sequence
  Synthetic
tcaccagcagactttacgcagcttagctcttaaacttgctccacttactcaccgccaacaaggtggacgccttagtggttcata

SEQ ID NO: 4064 - DNA, 84 bp, Artificial Sequence
  Synthetic
tcaccagcagactttacgcagcttagctcttaaaccccgtagttttcgactttcccaacaaggtggacgccttagtggttcata

SEQ ID NO: 4065 - DNA, 84 bp, Artificial Sequence
  Synthetic
tcaccagcagactttacgcagcttagctcttaaaccccgaagccgcagccgttcccaacaaggtggacgccttagtggttcata

SEQ ID NO: 4066 - DNA, 84 bp, Artificial Sequence
  Synthetic
tcaccagcagactttacgcagcttagctcttaaaccagccgttcccgcgctgtcccaacaaggtggacgccttagtggttcata

SEQ ID NO: 4067 - DNA, 84 bp, Artificial Sequence
  Synthetic
tcaccagcagactttacgcagcttagctcttaaacggtttctccggtctcccaaccaacaaggtggacgccttagtggttcata

SEQ ID NO: 4068 - DNA, 84 bp, Artificial Sequence
  Synthetic
tcaccagcagactttacgcagcttagctcttaaaccatggaatcccttctgcagccaacaaggtggacgccttagtggttcata

SEQ ID NO: 4069 - DNA, 84 bp, Artificial Sequence
  Synthetic
tcaccagcagactttacgcagcttagctcttaaacccactggttgtgcagccgcccaacaaggtggacgccttagtggttcata

SEQ ID NO: 4070 - DNA, 84 bp, Artificial Sequence
  Synthetic
tcaccagcagactttacgcagcttagctcttaaacacgtcagcacctgggacccccaacaaggtggacgccttagtggttcata

SEQ ID NO: 4071 - DNA, 84 bp, Artificial Sequence
  Synthetic
tcaccagcagactttacgcagcttagctcttaaacctggttggccgggtctgcgccaacaaggtggacgccttagtggttcata

SEQ ID NO: 4072 - DNA, 84 bp, Artificial Sequence
  Synthetic
tcaccagcagactttacgcagcttagctcttaaacccgcgagagccgagcgggcccaacaaggtggacgccttagtggttcata

SEQ ID NO: 4073 - DNA, 84 bp, Artificial Sequence
  Synthetic
tcaccagcagactttacgcagcttagctcttaaacaccagaggcgaggttgagaccaacaaggtggacgccttagtggttcata

SEQ ID NO: 4074 - DNA, 84 bp, Artificial Sequence
  Synthetic
tcaccagcagactttacgcagcttagctcttaaacaggtgactgcagagcggctccaacaaggtggacgccttagtggttcata

SEQ ID NO: 4075 - DNA, 84 bp, Artificial Sequence
  Synthetic
tcaccagcagactttacgcagcttagctcttaaacgcctcagctttcgcggttcccaacaaggtggacgccttagtggttcata

SEQ ID NO: 4076 - DNA, 84 bp, Artificial Sequence
  Synthetic
tcaccagcagactttacgcagcttagctcttaaacctcaacccaacgccgccacccaacaaggtggacgccttagtggttcata

SEQ ID NO: 4077 - DNA, 84 bp, Artificial Sequence
  Synthetic
tcaccagcagactttacgcagcttagctcttaaacgacttcgagccatggcggtccaacaaggtggacgccttagtggttcata

SEQ ID NO: 4078 - DNA, 84 bp, Artificial Sequence
  Synthetic
tcaccagcagactttacgcagcttagctcttaaactcaccgccatggctcgaagccaacaaggtggacgccttagtggttcata

SEQ ID NO: 4079 - DNA, 84 bp, Artificial Sequence
  Synthetic
tcaccagcagactttacgcagcttagctcttaaacccatggctcgaagtccggaccaacaaggtggacgccttagtggttcata

SEQ ID NO: 4080 - DNA, 84 bp, Artificial Sequence
  Synthetic
tcaccagcagactttacgcagcttagctcttaaacctacggttccgatccccatccaacaaggtggacgccttagtggttcata

SEQ ID NO: 4081 - DNA, 84 bp, Artificial Sequence
  Synthetic
tcaccagcagactttacgcagcttagctcttaaacatccccatcggtttccttcccaacaaggtggacgccttagtggttcata

SEQ ID NO: 4082 - DNA, 84 bp, Artificial Sequence
  Synthetic
tcaccagcagactttacgcagcttagctcttaaacctcattaggccgacaaccaccaacaaggtggacgccttagtggttcata

SEQ ID NO: 4083 - DNA, 84 bp, Artificial Sequence
  Synthetic
tcaccagcagactttacgcagcttagctcttaaacccgacttcctccgcgagctccaacaaggtggacgccttagtggttcata

SEQ ID NO: 4084 - DNA, 84 bp, Artificial Sequence
  Synthetic
tcaccagcagactttacgcagcttagctcttaaacgaggaggagctcgctgccgccaacaaggtggacgccttagtggttcata

SEQ ID NO: 4085 - DNA, 84 bp, Artificial Sequence
  Synthetic
tcaccagcagactttacgcagcttagctcttaaacagcgtcccccggcagcgagccaacaaggtggacgccttagtggttcata

SEQ ID NO: 4086 - DNA, 84 bp, Artificial Sequence
  Synthetic
tcaccagcagactttacgcagcttagctcttaaactcgctctgtgcggggctctccaacaaggtggacgccttagtggttcata

SEQ ID NO: 4087 - DNA, 84 bp, Artificial Sequence
  Synthetic
tcaccagcagactttacgcagcttagctcttaaacctctctctggagtgaggcgccaacaaggtggacgccttagtggttcata

SEQ ID NO: 4088 - DNA, 84 bp, Artificial Sequence
  Synthetic
tcaccagcagactttacgcagcttagctcttaaacccgagaccttcgctctcacccaacaaggtggacgccttagtggttcata

SEQ ID NO: 4089 - DNA, 84 bp, Artificial Sequence
  Synthetic
tcaccagcagactttacgcagcttagctcttaaacgagccttccgcagctgccgccaacaaggtggacgccttagtggttcata

SEQ ID NO: 4090 - DNA, 84 bp, Artificial Sequence
  Synthetic
tcaccagcagactttacgcagcttagctcttaaacactttctcggcgccgcggcccaacaaggtggacgccttagtggttcata

SEQ ID NO: 4091 - DNA, 84 bp, Artificial Sequence
  Synthetic
tcaccagcagactttacgcagcttagctcttaaacgggagaagtggccctggacccaacaaggtggacgccttagtggttcata

SEQ ID NO: 4092 - DNA, 84 bp, Artificial Sequence
  Synthetic
tcaccagcagactttacgcagcttagctcttaaacttcctcaagccaggtagatccaacaaggtggacgccttagtggttcata

SEQ ID NO: 4093 - DNA, 84 bp, Artificial Sequence
  Synthetic
tcaccagcagactttacgcagcttagctcttaaacccagttcgtcgtcttttgcccaacaaggtggacgccttagtggttcata

SEQ ID NO: 4094 - DNA, 84 bp, Artificial Sequence
  Synthetic
tcaccagcagactttacgcagcttagctcttaaacgttcgtcgtcttttgctgcccaacaaggtggacgccttagtggttcata

SEQ ID NO: 4095 - DNA, 84 bp, Artificial Sequence
  Synthetic
tcaccagcagactttacgcagcttagctcttaaactccaaagcccgcgctcccgccaacaaggtggacgccttagtggttcata

SEQ ID NO: 4096 - DNA, 84 bp, Artificial Sequence
  Synthetic
tcaccagcagactttacgcagcttagctcttaaacaagctcgctctcccttctcccaacaaggtggacgccttagtggttcata

SEQ ID NO: 4097 - DNA, 84 bp, Artificial Sequence
  Synthetic
tcaccagcagactttacgcagcttagctcttaaacccttccaaagcccgcgctcccaacaaggtggacgccttagtggttcata

SEQ ID NO: 4098 - DNA, 84 bp, Artificial Sequence
  Synthetic
tcaccagcagactttacgcagcttagctcttaaacccatagagccactcttcctccaacaaggtggacgccttagtggttcata

SEQ ID NO: 4099 - DNA, 84 bp, Artificial Sequence
  Synthetic
tcaccagcagactttacgcagcttagctcttaaactcctgggattggagtctcgccaacaaggtggacgccttagtggttcata

SEQ ID NO: 4100 - DNA, 84 bp, Artificial Sequence
  Synthetic
tcaccagcagactttacgcagcttagctcttaaacaagtcaggccggacaggacccaacaaggtggacgccttagtggttcata

SEQ ID NO: 4101 - DNA, 84 bp, Artificial Sequence
  Synthetic
tcaccagcagactttacgcagcttagctcttaaacggggagctagtctttgcttccaacaaggtggacgccttagtggttcata

SEQ ID NO: 4102 - DNA, 84 bp, Artificial Sequence
  Synthetic
tcaccagcagactttacgcagcttagctcttaaaccccgggtcctcccactgatccaacaaggtggacgccttagtggttcata

SEQ ID NO: 4103 - DNA, 84 bp, Artificial Sequence
  Synthetic
tcaccagcagactttacgcagcttagctcttaaacgggcctggcggttgagcccccaacaaggtggacgccttagtggttcata

SEQ ID NO: 4104 - DNA, 84 bp, Artificial Sequence
  Synthetic
tcaccagcagactttacgcagcttagctcttaaacgtaccctccaaatcctcttccaacaaggtggacgccttagtggttcata

SEQ ID NO: 4105 - DNA, 84 bp, Artificial Sequence
  Synthetic
tcaccagcagactttacgcagcttagctcttaaacgcgcatggctttcgggggcccaacaaggtggacgccttagtggttcata

SEQ ID NO: 4106 - DNA, 84 bp, Artificial Sequence
  Synthetic
tcaccagcagactttacgcagcttagctcttaaactttcttcctggccttccgcccaacaaggtggacgccttagtggttcata

SEQ ID NO: 4107 - DNA, 84 bp, Artificial Sequence
  Synthetic
tcaccagcagactttacgcagcttagctcttaaaccccgcctgcattcttcggtccaacaaggtggacgccttagtggttcata

SEQ ID NO: 4108 - DNA, 84 bp, Artificial Sequence
  Synthetic
tcaccagcagactttacgcagcttagctcttaaacccgcctctgttactaggggccaacaaggtggacgccttagtggttcata

SEQ ID NO: 4109 - DNA, 84 bp, Artificial Sequence
  Synthetic
tcaccagcagactttacgcagcttagctcttaaacctgttactagggggtctcgccaacaaggtggacgccttagtggttcata

SEQ ID NO: 4110 - DNA, 84 bp, Artificial Sequence
  Synthetic
tcaccagcagactttacgcagcttagctcttaaacgacggcctgccccacctctccaacaaggtggacgccttagtggttcata

SEQ ID NO: 4111 - DNA, 84 bp, Artificial Sequence
  Synthetic
tcaccagcagactttacgcagcttagctcttaaaccctagctagccagacggccccaacaaggtggacgccttagtggttcata

SEQ ID NO: 4112 - DNA, 84 bp, Artificial Sequence
  Synthetic
tcaccagcagactttacgcagcttagctcttaaaccacctctgcgcctcacagaccaacaaggtggacgccttagtggttcata

SEQ ID NO: 4113 - DNA, 84 bp, Artificial Sequence
  Synthetic
tcaccagcagactttacgcagcttagctcttaaactgcagggtcctcaccgtctccaacaaggtggacgccttagtggttcata

SEQ ID NO: 4114 - DNA, 84 bp, Artificial Sequence
  Synthetic
tcaccagcagactttacgcagcttagctcttaaacgggctcggctgtctcggtcccaacaaggtggacgccttagtggttcata

SEQ ID NO: 4115 - DNA, 84 bp, Artificial Sequence
  Synthetic
tcaccagcagactttacgcagcttagctcttaaactgcagggcgggacttcgacccaacaaggtggacgccttagtggttcata

SEQ ID NO: 4116 - DNA, 84 bp, Artificial Sequence
  Synthetic
tcaccagcagactttacgcagcttagctcttaaaccctcgcgcaccccgagtctccaacaaggtggacgccttagtggttcata

SEQ ID NO: 4117 - DNA, 84 bp, Artificial Sequence
  Synthetic
tcaccagcagactttacgcagcttagctcttaaaccaccactctgtcgatcctcccaacaaggtggacgccttagtggttcata

SEQ ID NO: 4118 - DNA, 84 bp, Artificial Sequence
  Synthetic
tcaccagcagactttacgcagcttagctcttaaacctctgtcgatcctcctcgcccaacaaggtggacgccttagtggttcata

SEQ ID NO: 4119 - DNA, 84 bp, Artificial Sequence
  Synthetic
tcaccagcagactttacgcagcttagctcttaaaccacacctcggcccacagatccaacaaggtggacgccttagtggttcata

SEQ ID NO: 4120 - DNA, 84 bp, Artificial Sequence
  Synthetic
tcaccagcagactttacgcagcttagctcttaaacaggtgtgtggcgagcgtccccaacaaggtggacgccttagtggttcata

SEQ ID NO: 4121 - DNA, 84 bp, Artificial Sequence
  Synthetic
tcaccagcagactttacgcagcttagctcttaaacctcggacgctcgccacacaccaacaaggtggacgccttagtggttcata

SEQ ID NO: 4122 - DNA, 84 bp, Artificial Sequence
  Synthetic
tcaccagcagactttacgcagcttagctcttaaaccctcatggtgactcggcggccaacaaggtggacgccttagtggttcata

SEQ ID NO: 4123 - DNA, 84 bp, Artificial Sequence
  Synthetic
tcaccagcagactttacgcagcttagctcttaaactccgcggcggttttctcccccaacaaggtggacgccttagtggttcata

SEQ ID NO: 4124 - DNA, 84 bp, Artificial Sequence
  Synthetic
tcaccagcagactttacgcagcttagctcttaaaccggcggttttctcccctcaccaacaaggtggacgccttagtggttcata

SEQ ID NO: 4125 - DNA, 84 bp, Artificial Sequence
  Synthetic
tcaccagcagactttacgcagcttagctcttaaacgtctacctcgctagcatgtccaacaaggtggacgccttagtggttcata

SEQ ID NO: 4126 - DNA, 84 bp, Artificial Sequence
  Synthetic
tcaccagcagactttacgcagcttagctcttaaacccagtcttgccgcggcccgccaacaaggtggacgccttagtggttcata

SEQ ID NO: 4127 - DNA, 84 bp, Artificial Sequence
  Synthetic
tcaccagcagactttacgcagcttagctcttaaactcgtgcttcaccggtctacccaacaaggtggacgccttagtggttcata

SEQ ID NO: 4128 - DNA, 84 bp, Artificial Sequence
  Synthetic
tcaccagcagactttacgcagcttagctcttaaactcatccgggaactcggattccaacaaggtggacgccttagtggttcata

SEQ ID NO: 4129 - DNA, 84 bp, Artificial Sequence
  Synthetic
tcaccagcagactttacgcagcttagctcttaaacaccaatggctgccacccgcccaacaaggtggacgccttagtggttcata

SEQ ID NO: 4130 - DNA, 84 bp, Artificial Sequence
  Synthetic
tcaccagcagactttacgcagcttagctcttaaacacggtgagatcccaccaccccaacaaggtggacgccttagtggttcata

SEQ ID NO: 4131 - DNA, 84 bp, Artificial Sequence
  Synthetic
tcaccagcagactttacgcagcttagctcttaaactgttggcggcggtccgcgcccaacaaggtggacgccttagtggttcata

SEQ ID NO: 4132 - DNA, 84 bp, Artificial Sequence
  Synthetic
tcaccagcagactttacgcagcttagctcttaaactttccgagctacgatcaccccaacaaggtggacgccttagtggttcata

SEQ ID NO: 4133 - DNA, 84 bp, Artificial Sequence
  Synthetic
tcaccagcagactttacgcagcttagctcttaaaccgggtgatcgtagctcggaccaacaaggtggacgccttagtggttcata

SEQ ID NO: 4134 - DNA, 84 bp, Artificial Sequence
  Synthetic
tcaccagcagactttacgcagcttagctcttaaacgtccctaccgtcagtcggtccaacaaggtggacgccttagtggttcata

SEQ ID NO: 4135 - DNA, 84 bp, Artificial Sequence
  Synthetic
tcaccagcagactttacgcagcttagctcttaaacaccgtcagtcggtccgtccccaacaaggtggacgccttagtggttcata

SEQ ID NO: 4136 - DNA, 84 bp, Artificial Sequence
  Synthetic
tcaccagcagactttacgcagcttagctcttaaactcttgctcgcctcccgtccccaacaaggtggacgccttagtggttcata

SEQ ID NO: 4137 - DNA, 84 bp, Artificial Sequence
  Synthetic
tcaccagcagactttacgcagcttagctcttaaacctgccgggtggtaccgagcccaacaaggtggacgccttagtggttcata

SEQ ID NO: 4138 - DNA, 84 bp, Artificial Sequence
  Synthetic
tcaccagcagactttacgcagcttagctcttaaacttcctcccccgtggaggccccaacaaggtggacgccttagtggttcata

SEQ ID NO: 4139 - DNA, 84 bp, Artificial Sequence
  Synthetic
tcaccagcagactttacgcagcttagctcttaaacactcgcgaggagggggccaccaacaaggtggacgccttagtggttcata

SEQ ID NO: 4140 - DNA, 84 bp, Artificial Sequence
  Synthetic
tcaccagcagactttacgcagcttagctcttaaactgagagctaacttggggtcccaacaaggtggacgccttagtggttcata

SEQ ID NO: 4141 - DNA, 84 bp, Artificial Sequence
  Synthetic
tcaccagcagactttacgcagcttagctcttaaacaagttagctctcagggctcccaacaaggtggacgccttagtggttcata

SEQ ID NO: 4142 - DNA, 84 bp, Artificial Sequence
  Synthetic
tcaccagcagactttacgcagcttagctcttaaacctcatctccgggcacgagcccaacaaggtggacgccttagtggttcata

SEQ ID NO: 4143 - DNA, 84 bp, Artificial Sequence
  Synthetic
tcaccagcagactttacgcagcttagctcttaaacctgccgtccgccatgtctgccaacaaggtggacgccttagtggttcata

SEQ ID NO: 4144 - DNA, 84 bp, Artificial Sequence
  Synthetic
tcaccagcagactttacgcagcttagctcttaaactgtctgggcgaccggcgcgccaacaaggtggacgccttagtggttcata

SEQ ID NO: 4145 - DNA, 84 bp, Artificial Sequence
  Synthetic
tcaccagcagactttacgcagcttagctcttaaacccggggtcttccggagggaccaacaaggtggacgccttagtggttcata

SEQ ID NO: 4146 - DNA, 84 bp, Artificial Sequence
  Synthetic
tcaccagcagactttacgcagcttagctcttaaaccatcccctgcgccgctcctccaacaaggtggacgccttagtggttcata

SEQ ID NO: 4147 - DNA, 84 bp, Artificial Sequence
  Synthetic
tcaccagcagactttacgcagcttagctcttaaactgacttccggcgttgcccgccaacaaggtggacgccttagtggttcata

SEQ ID NO: 4148 - DNA, 84 bp, Artificial Sequence
  Synthetic
tcaccagcagactttacgcagcttagctcttaaaccctcaggcggctcccgggcccaacaaggtggacgccttagtggttcata

SEQ ID NO: 4149 - DNA, 84 bp, Artificial Sequence
  Synthetic
tcaccagcagactttacgcagcttagctcttaaaccgagtccagtcagacgtcgccaacaaggtggacgccttagtggttcata

SEQ ID NO: 4150 - DNA, 84 bp, Artificial Sequence
  Synthetic
tcaccagcagactttacgcagcttagctcttaaacgtcagacgtcgacgccgtcccaacaaggtggacgccttagtggttcata

SEQ ID NO: 4151 - DNA, 84 bp, Artificial Sequence
  Synthetic
tcaccagcagactttacgcagcttagctcttaaacttcagtcgtgcgctcctgaccaacaaggtggacgccttagtggttcata

SEQ ID NO: 4152 - DNA, 84 bp, Artificial Sequence
  Synthetic
tcaccagcagactttacgcagcttagctcttaaacataggagccgcgctggctgccaacaaggtggacgccttagtggttcata

SEQ ID NO: 4153 - DNA, 84 bp, Artificial Sequence
  Synthetic
tcaccagcagactttacgcagcttagctcttaaactggggggaactgcgcacggccaacaaggtggacgccttagtggttcata

SEQ ID NO: 4154 - DNA, 84 bp, Artificial Sequence
  Synthetic
tcaccagcagactttacgcagcttagctcttaaacgcgcggctcctattggctaccaacaaggtggacgccttagtggttcata

SEQ ID NO: 4155 - DNA, 84 bp, Artificial Sequence
  Synthetic
tcaccagcagactttacgcagcttagctcttaaactggtccgcgcgagcgtggtccaacaaggtggacgccttagtggttcata

SEQ ID NO: 4156 - DNA, 84 bp, Artificial Sequence
  Synthetic
tcaccagcagactttacgcagcttagctcttaaacggggtgacccgcggaggtgccaacaaggtggacgccttagtggttcata

SEQ ID NO: 4157 - DNA, 84 bp, Artificial Sequence
  Synthetic
tcaccagcagactttacgcagcttagctcttaaacctcccacctccgcgggtcaccaacaaggtggacgccttagtggttcata

SEQ ID NO: 4158 - DNA, 84 bp, Artificial Sequence
  Synthetic
tcaccagcagactttacgcagcttagctcttaaacgcctaccttcgccctctctccaacaaggtggacgccttagtggttcata

SEQ ID NO: 4159 - DNA, 84 bp, Artificial Sequence
  Synthetic
tcaccagcagactttacgcagcttagctcttaaactctcttttttaccccgcctccaacaaggtggacgccttagtggttcata

SEQ ID NO: 4160 - DNA, 84 bp, Artificial Sequence
  Synthetic
tcaccagcagactttacgcagcttagctcttaaactcgccctctcttttttaccccaacaaggtggacgccttagtggttcata

SEQ ID NO: 4161 - DNA, 84 bp, Artificial Sequence
  Synthetic
tcaccagcagactttacgcagcttagctcttaaacccctcggtctcgacctcctccaacaaggtggacgccttagtggttcata

SEQ ID NO: 4162 - DNA, 84 bp, Artificial Sequence
  Synthetic
tcaccagcagactttacgcagcttagctcttaaacttcctgtcaggaggcgaagccaacaaggtggacgccttagtggttcata

SEQ ID NO: 4163 - DNA, 84 bp, Artificial Sequence
  Synthetic
tcaccagcagactttacgcagcttagctcttaaacgtcaggaggcgaagggggaccaacaaggtggacgccttagtggttcata

SEQ ID NO: 4164 - DNA, 84 bp, Artificial Sequence
  Synthetic
tcaccagcagactttacgcagcttagctcttaaacttggttccccagccgcgggccaacaaggtggacgccttagtggttcata

SEQ ID NO: 4165 - DNA, 84 bp, Artificial Sequence
  Synthetic
tcaccagcagactttacgcagcttagctcttaaaccctcccctgcgaaccgtcgccaacaaggtggacgccttagtggttcata

SEQ ID NO: 4166 - DNA, 84 bp, Artificial Sequence
  Synthetic
tcaccagcagactttacgcagcttagctcttaaacctgcgaaccgtcgaccgagccaacaaggtggacgccttagtggttcata

SEQ ID NO: 4167 - DNA, 84 bp, Artificial Sequence
  Synthetic
tcaccagcagactttacgcagcttagctcttaaacgtcccagccgccgagctctccaacaaggtggacgccttagtggttcata

SEQ ID NO: 4168 - DNA, 84 bp, Artificial Sequence
  Synthetic
tcaccagcagactttacgcagcttagctcttaaacctagtcgcctccgccaccgccaacaaggtggacgccttagtggttcata

SEQ ID NO: 4169 - DNA, 84 bp, Artificial Sequence
  Synthetic
tcaccagcagactttacgcagcttagctcttaaacccagtcccagccgccgagcccaacaaggtggacgccttagtggttcata

SEQ ID NO: 4170 - DNA, 84 bp, Artificial Sequence
  Synthetic
tcaccagcagactttacgcagcttagctcttaaacagatcgtggacggggcctgccaacaaggtggacgccttagtggttcata

SEQ ID NO: 4171 - DNA, 84 bp, Artificial Sequence
  Synthetic
tcaccagcagactttacgcagcttagctcttaaacttgaaagccgccttcatccccaacaaggtggacgccttagtggttcata

SEQ ID NO: 4172 - DNA, 84 bp, Artificial Sequence
  Synthetic
tcaccagcagactttacgcagcttagctcttaaaccggcgggcctctgtgggtaccaacaaggtggacgccttagtggttcata

SEQ ID NO: 4173 - DNA, 84 bp, Artificial Sequence
  Synthetic
tcaccagcagactttacgcagcttagctcttaaacgtgatcttggcgcgaaactccaacaaggtggacgccttagtggttcata

SEQ ID NO: 4174 - DNA, 84 bp, Artificial Sequence
  Synthetic
tcaccagcagactttacgcagcttagctcttaaacctgagggggattccgcgtgccaacaaggtggacgccttagtggttcata

SEQ ID NO: 4175 - DNA, 84 bp, Artificial Sequence
  Synthetic
tcaccagcagactttacgcagcttagctcttaaaccacctcgcaccacagcctgccaacaaggtggacgccttagtggttcata

SEQ ID NO: 4176 - DNA, 84 bp, Artificial Sequence
  Synthetic
tcaccagcagactttacgcagcttagctcttaaacccgcggctactgcagtcagccaacaaggtggacgccttagtggttcata

SEQ ID NO: 4177 - DNA, 84 bp, Artificial Sequence
  Synthetic
tcaccagcagactttacgcagcttagctcttaaacgcgagaacctctaccggacccaacaaggtggacgccttagtggttcata

SEQ ID NO: 4178 - DNA, 84 bp, Artificial Sequence
  Synthetic
tcaccagcagactttacgcagcttagctcttaaacccaacgaatcccacgaggaccaacaaggtggacgccttagtggttcata

SEQ ID NO: 4179 - DNA, 84 bp, Artificial Sequence
  Synthetic
tcaccagcagactttacgcagcttagctcttaaacctccaatatggcgcctccgccaacaaggtggacgccttagtggttcata

SEQ ID NO: 4180 - DNA, 84 bp, Artificial Sequence
  Synthetic
tcaccagcagactttacgcagcttagctcttaaacccgctagcagcacccgctcccaacaaggtggacgccttagtggttcata

SEQ ID NO: 4181 - DNA, 84 bp, Artificial Sequence
  Synthetic
tcaccagcagactttacgcagcttagctcttaaacctcgcgctcttgcccgcccccaacaaggtggacgccttagtggttcata

SEQ ID NO: 4182 - DNA, 84 bp, Artificial Sequence
  Synthetic
tcaccagcagactttacgcagcttagctcttaaaccctttaagagcagcgattgccaacaaggtggacgccttagtggttcata

SEQ ID NO: 4183 - DNA, 84 bp, Artificial Sequence
  Synthetic
tcaccagcagactttacgcagcttagctcttaaaccgggtcccaggtaagtacgccaacaaggtggacgccttagtggttcata

SEQ ID NO: 4184 - DNA, 84 bp, Artificial Sequence
  Synthetic
tcaccagcagactttacgcagcttagctcttaaaccgagttgagctcctcttgcccaacaaggtggacgccttagtggttcata

SEQ ID NO: 4185 - DNA, 84 bp, Artificial Sequence
  Synthetic
tcaccagcagactttacgcagcttagctcttaaaccagagagcgaaccgcggctccaacaaggtggacgccttagtggttcata

SEQ ID NO: 4186 - DNA, 84 bp, Artificial Sequence
  Synthetic
tcaccagcagactttacgcagcttagctcttaaacgtgtccctgctccgctcctccaacaaggtggacgccttagtggttcata

SEQ ID NO: 4187 - DNA, 84 bp, Artificial Sequence
  Synthetic
tcaccagcagactttacgcagcttagctcttaaacacggtggagccgcggttcgccaacaaggtggacgccttagtggttcata

SEQ ID NO: 4188 - DNA, 84 bp, Artificial Sequence
  Synthetic
tcaccagcagactttacgcagcttagctcttaaacccatagccccagaggtgctccaacaaggtggacgccttagtggttcata

SEQ ID NO: 4189 - DNA, 84 bp, Artificial Sequence
  Synthetic
tcaccagcagactttacgcagcttagctcttaaaccagaggtgctcccacgccgccaacaaggtggacgccttagtggttcata

SEQ ID NO: 4190 - DNA, 84 bp, Artificial Sequence
  Synthetic
tcaccagcagactttacgcagcttagctcttaaacacgccgccacagcttactcccaacaaggtggacgccttagtggttcata

SEQ ID NO: 4191 - DNA, 84 bp, Artificial Sequence
  Synthetic
tcaccagcagactttacgcagcttagctcttaaacccatcgcactccgagtcttccaacaaggtggacgccttagtggttcata

SEQ ID NO: 4192 - DNA, 84 bp, Artificial Sequence
  Synthetic
tcaccagcagactttacgcagcttagctcttaaacagcgcgggccttggaacttccaacaaggtggacgccttagtggttcata

SEQ ID NO: 4193 - DNA, 84 bp, Artificial Sequence
  Synthetic
tcaccagcagactttacgcagcttagctcttaaacacctttttcccagcgcgggccaacaaggtggacgccttagtggttcata

SEQ ID NO: 4194 - DNA, 84 bp, Artificial Sequence
  Synthetic
tcaccagcagactttacgcagcttagctcttaaacgtagtggtgctgtaggaggccaacaaggtggacgccttagtggttcata

SEQ ID NO: 4195 - DNA, 84 bp, Artificial Sequence
  Synthetic
tcaccagcagactttacgcagcttagctcttaaacagtccattgccagcgcctcccaacaaggtggacgccttagtggttcata

SEQ ID NO: 4196 - DNA, 84 bp, Artificial Sequence
  Synthetic
tcaccagcagactttacgcagcttagctcttaaaccttcttgtacagccccggcccaacaaggtggacgccttagtggttcata

SEQ ID NO: 4197 - DNA, 84 bp, Artificial Sequence
  Synthetic
tcaccagcagactttacgcagcttagctcttaaacagagtctgccctcccgctaccaacaaggtggacgccttagtggttcata

SEQ ID NO: 4198 - DNA, 84 bp, Artificial Sequence
  Synthetic
tcaccagcagactttacgcagcttagctcttaaaccctcagcagcaagccccgcccaacaaggtggacgccttagtggttcata

SEQ ID NO: 4199 - DNA, 84 bp, Artificial Sequence
  Synthetic
tcaccagcagactttacgcagcttagctcttaaaccggaagaagctacgggtgaccaacaaggtggacgccttagtggttcata

SEQ ID NO: 4200 - DNA, 84 bp, Artificial Sequence
  Synthetic
tcaccagcagactttacgcagcttagctcttaaactcctcccatagcgcttattccaacaaggtggacgccttagtggttcata

SEQ ID NO: 4201 - DNA, 84 bp, Artificial Sequence
  Synthetic
tcaccagcagactttacgcagcttagctcttaaaccccttccactatggccgctccaacaaggtggacgccttagtggttcata

SEQ ID NO: 4202 - DNA, 84 bp, Artificial Sequence
  Synthetic
tcaccagcagactttacgcagcttagctcttaaacatagcgcttattgcctcacccaacaaggtggacgccttagtggttcata

SEQ ID NO: 4203 - DNA, 84 bp, Artificial Sequence
  Synthetic
tcaccagcagactttacgcagcttagctcttaaaccgtcgtacccccgcctccgccaacaaggtggacgccttagtggttcata

SEQ ID NO: 4204 - DNA, 84 bp, Artificial Sequence
  Synthetic
tcaccagcagactttacgcagcttagctcttaaacccggggtgcggagggagtcccaacaaggtggacgccttagtggttcata

SEQ ID NO: 4205 - DNA, 84 bp, Artificial Sequence
  Synthetic
tcaccagcagactttacgcagcttagctcttaaacagtgctccccgtcgtacccccaacaaggtggacgccttagtggttcata

SEQ ID NO: 4206 - DNA, 84 bp, Artificial Sequence
  Synthetic
tcaccagcagactttacgcagcttagctcttaaacttaccgcttctgctctccgccaacaaggtggacgccttagtggttcata

SEQ ID NO: 4207 - DNA, 84 bp, Artificial Sequence
  Synthetic
tcaccagcagactttacgcagcttagctcttaaacggtagacagaaccgagccgccaacaaggtggacgccttagtggttcata

SEQ ID NO: 4208 - DNA, 84 bp, Artificial Sequence
  Synthetic
tcaccagcagactttacgcagcttagctcttaaactggggccctgacggcgacgccaacaaggtggacgccttagtggttcata

SEQ ID NO: 4209 - DNA, 84 bp, Artificial Sequence
  Synthetic
tcaccagcagactttacgcagcttagctcttaaacatgcggccctagggctgggccaacaaggtggacgccttagtggttcata

SEQ ID NO: 4210 - DNA, 84 bp, Artificial Sequence
  Synthetic
tcaccagcagactttacgcagcttagctcttaaacctctccgctgcgggggaggccaacaaggtggacgccttagtggttcata

SEQ ID NO: 4211 - DNA, 84 bp, Artificial Sequence
  Synthetic
tcaccagcagactttacgcagcttagctcttaaactggcggaaccttcccaggcccaacaaggtggacgccttagtggttcata

SEQ ID NO: 4212 - DNA, 84 bp, Artificial Sequence
  Synthetic
tcaccagcagactttacgcagcttagctcttaaacccgggggctcgggcgcctgccaacaaggtggacgccttagtggttcata

SEQ ID NO: 4213 - DNA, 84 bp, Artificial Sequence
  Synthetic
tcaccagcagactttacgcagcttagctcttaaactctcgggctctggtagtcgccaacaaggtggacgccttagtggttcata

SEQ ID NO: 4214 - DNA, 84 bp, Artificial Sequence
  Synthetic
tcaccagcagactttacgcagcttagctcttaaacccccggagcacggcaggagccaacaaggtggacgccttagtggttcata

SEQ ID NO: 4215 - DNA, 84 bp, Artificial Sequence
  Synthetic
tcaccagcagactttacgcagcttagctcttaaaccccagtagccgaccctggcccaacaaggtggacgccttagtggttcata

SEQ ID NO: 4216 - DNA, 84 bp, Artificial Sequence
  Synthetic
tcaccagcagactttacgcagcttagctcttaaactcaggttccttagtcccgcccaacaaggtggacgccttagtggttcata

SEQ ID NO: 4217 - DNA, 84 bp, Artificial Sequence
  Synthetic
tcaccagcagactttacgcagcttagctcttaaacccccgggcaccggactcacccaacaaggtggacgccttagtggttcata

SEQ ID NO: 4218 - DNA, 84 bp, Artificial Sequence
  Synthetic
tcaccagcagactttacgcagcttagctcttaaaccccgctgctctgcgccaggccaacaaggtggacgccttagtggttcata

SEQ ID NO: 4219 - DNA, 84 bp, Artificial Sequence
  Synthetic
tcaccagcagactttacgcagcttagctcttaaactgtcagtttggggcatctcccaacaaggtggacgccttagtggttcata

SEQ ID NO: 4220 - DNA, 84 bp, Artificial Sequence
  Synthetic
tcaccagcagactttacgcagcttagctcttaaactcttggagacagtgagctcccaacaaggtggacgccttagtggttcata

SEQ ID NO: 4221 - DNA, 84 bp, Artificial Sequence
  Synthetic
tcaccagcagactttacgcagcttagctcttaaacttttgtgtccccctgttgtccaacaaggtggacgccttagtggttcata

SEQ ID NO: 4222 - DNA, 84 bp, Artificial Sequence
  Synthetic
tcaccagcagactttacgcagcttagctcttaaacccattttgtgtccccctgtccaacaaggtggacgccttagtggttcata

SEQ ID NO: 4223 - DNA, 84 bp, Artificial Sequence
  Synthetic
tcaccagcagactttacgcagcttagctcttaaaccctgttgttgtcgttgacaccaacaaggtggacgccttagtggttcata

SEQ ID NO: 4224 - DNA, 84 bp, Artificial Sequence
  Synthetic
tcaccagcagactttacgcagcttagctcttaaactggcggcctctgtatcagtccaacaaggtggacgccttagtggttcata

SEQ ID NO: 4225 - DNA, 84 bp, Artificial Sequence
  Synthetic
tcaccagcagactttacgcagcttagctcttaaacaatcctgcggacgatccctccaacaaggtggacgccttagtggttcata

SEQ ID NO: 4226 - DNA, 84 bp, Artificial Sequence
  Synthetic
tcaccagcagactttacgcagcttagctcttaaaccaggattgggactgatacaccaacaaggtggacgccttagtggttcata

SEQ ID NO: 4227 - DNA, 84 bp, Artificial Sequence
  Synthetic
tcaccagcagactttacgcagcttagctcttaaacccatcgcgggaagggaagtccaacaaggtggacgccttagtggttcata

SEQ ID NO: 4228 - DNA, 84 bp, Artificial Sequence
  Synthetic
tcaccagcagactttacgcagcttagctcttaaacccgcagcagctccctgtgcccaacaaggtggacgccttagtggttcata

SEQ ID NO: 4229 - DNA, 84 bp, Artificial Sequence
  Synthetic
tcaccagcagactttacgcagcttagctcttaaacctgaagtccccgccgcaacccaacaaggtggacgccttagtggttcata

SEQ ID NO: 4230 - DNA, 84 bp, Artificial Sequence
  Synthetic
tcaccagcagactttacgcagcttagctcttaaacgggactccttctcctgcagccaacaaggtggacgccttagtggttcata

SEQ ID NO: 4231 - DNA, 84 bp, Artificial Sequence
  Synthetic
tcaccagcagactttacgcagcttagctcttaaactagatttactgtcagaaccccaacaaggtggacgccttagtggttcata

SEQ ID NO: 4232 - DNA, 84 bp, Artificial Sequence
  Synthetic
tcaccagcagactttacgcagcttagctcttaaacttcgtcttttacatcctgaccaacaaggtggacgccttagtggttcata

SEQ ID NO: 4233 - DNA, 84 bp, Artificial Sequence
  Synthetic
tcaccagcagactttacgcagcttagctcttaaacctggccgatcctactgcttccaacaaggtggacgccttagtggttcata

SEQ ID NO: 4234 - DNA, 84 bp, Artificial Sequence
  Synthetic
tcaccagcagactttacgcagcttagctcttaaaccctctaaagtcggcatctgccaacaaggtggacgccttagtggttcata

SEQ ID NO: 4235 - DNA, 84 bp, Artificial Sequence
  Synthetic
tcaccagcagactttacgcagcttagctcttaaacactgcttttccagcaggcgccaacaaggtggacgccttagtggttcata

SEQ ID NO: 4236 - DNA, 84 bp, Artificial Sequence
  Synthetic
tcaccagcagactttacgcagcttagctcttaaactagggggtccctcggggtgccaacaaggtggacgccttagtggttcata

SEQ ID NO: 4237 - DNA, 84 bp, Artificial Sequence
  Synthetic
tcaccagcagactttacgcagcttagctcttaaactaccgcctgaggccagggcccaacaaggtggacgccttagtggttcata

SEQ ID NO: 4238 - DNA, 84 bp, Artificial Sequence
  Synthetic
tcaccagcagactttacgcagcttagctcttaaactcggggggcctcggctccaccaacaaggtggacgccttagtggttcata

SEQ ID NO: 4239 - DNA, 84 bp, Artificial Sequence
  Synthetic
tcaccagcagactttacgcagcttagctcttaaacaagttcgcgccacggcattccaacaaggtggacgccttagtggttcata

SEQ ID NO: 4240 - DNA, 84 bp, Artificial Sequence
  Synthetic
tcaccagcagactttacgcagcttagctcttaaacctgcagtcccaagttcgcgccaacaaggtggacgccttagtggttcata

SEQ ID NO: 4241 - DNA, 84 bp, Artificial Sequence
  Synthetic
tcaccagcagactttacgcagcttagctcttaaaccggcattcgcgcgcagacgccaacaaggtggacgccttagtggttcata

SEQ ID NO: 4242 - DNA, 84 bp, Artificial Sequence
  Synthetic
tcaccagcagactttacgcagcttagctcttaaacacgacggttggagcgcctgccaacaaggtggacgccttagtggttcata

SEQ ID NO: 4243 - DNA, 84 bp, Artificial Sequence
  Synthetic
tcaccagcagactttacgcagcttagctcttaaacacggtgagcgccggagccgccaacaaggtggacgccttagtggttcata

SEQ ID NO: 4244 - DNA, 84 bp, Artificial Sequence
  Synthetic
tcaccagcagactttacgcagcttagctcttaaactaggcctcggaacttgctcccaacaaggtggacgccttagtggttcata

SEQ ID NO: 4245 - DNA, 84 bp, Artificial Sequence
  Synthetic
tcaccagcagactttacgcagcttagctcttaaacacacccttcccacctgacgccaacaaggtggacgccttagtggttcata

SEQ ID NO: 4246 - DNA, 84 bp, Artificial Sequence
  Synthetic
tcaccagcagactttacgcagcttagctcttaaacctaagccggaagctggcgcccaacaaggtggacgccttagtggttcata

SEQ ID NO: 4247 - DNA, 84 bp, Artificial Sequence
  Synthetic
tcaccagcagactttacgcagcttagctcttaaacacctgacgtcaagcctgaaccaacaaggtggacgccttagtggttcata

SEQ ID NO: 4248 - DNA, 84 bp, Artificial Sequence
  Synthetic
tcaccagcagactttacgcagcttagctcttaaactgctccaggacctagggatccaacaaggtggacgccttagtggttcata

SEQ ID NO: 4249 - DNA, 84 bp, Artificial Sequence
  Synthetic
tcaccagcagactttacgcagcttagctcttaaacggacctagggatcttggccccaacaaggtggacgccttagtggttcata

SEQ ID NO: 4250 - DNA, 84 bp, Artificial Sequence
  Synthetic
tcaccagcagactttacgcagcttagctcttaaacagggatcttggccttccacccaacaaggtggacgccttagtggttcata

SEQ ID NO: 4251 - DNA, 84 bp, Artificial Sequence
  Synthetic
tcaccagcagactttacgcagcttagctcttaaacctcaacccggggcctcggcccaacaaggtggacgccttagtggttcata

SEQ ID NO: 4252 - DNA, 84 bp, Artificial Sequence
  Synthetic
tcaccagcagactttacgcagcttagctcttaaacgtcggtggctccccgcggcccaacaaggtggacgccttagtggttcata

SEQ ID NO: 4253 - DNA, 84 bp, Artificial Sequence
  Synthetic
tcaccagcagactttacgcagcttagctcttaaacgaccgatcgcgcctcccgcccaacaaggtggacgccttagtggttcata

SEQ ID NO: 4254 - DNA, 84 bp, Artificial Sequence
  Synthetic
tcaccagcagactttacgcagcttagctcttaaacactcgtggtacctggcgctccaacaaggtggacgccttagtggttcata

SEQ ID NO: 4255 - DNA, 84 bp, Artificial Sequence
  Synthetic
tcaccagcagactttacgcagcttagctcttaaaccgtctcgcgcgcctgcttcccaacaaggtggacgccttagtggttcata

SEQ ID NO: 4256 - DNA, 84 bp, Artificial Sequence
  Synthetic
tcaccagcagactttacgcagcttagctcttaaaccaacaacaagccgccgccaccaacaaggtggacgccttagtggttcata

SEQ ID NO: 4257 - DNA, 84 bp, Artificial Sequence
  Synthetic
tcaccagcagactttacgcagcttagctcttaaacccctgctctatggcggagtccaacaaggtggacgccttagtggttcata

SEQ ID NO: 4258 - DNA, 84 bp, Artificial Sequence
  Synthetic
tcaccagcagactttacgcagcttagctcttaaacttggaatcccggagacccgccaacaaggtggacgccttagtggttcata

SEQ ID NO: 4259 - DNA, 84 bp, Artificial Sequence
  Synthetic
tcaccagcagactttacgcagcttagctcttaaactaaccgagcccttggaatcccaacaaggtggacgccttagtggttcata

SEQ ID NO: 4260 - DNA, 84 bp, Artificial Sequence
  Synthetic
tcaccagcagactttacgcagcttagctcttaaacagaaggtcggggctgtcggccaacaaggtggacgccttagtggttcata

SEQ ID NO: 4261 - DNA, 84 bp, Artificial Sequence
  Synthetic
tcaccagcagactttacgcagcttagctcttaaacttgaggccctgcgcggccgccaacaaggtggacgccttagtggttcata

SEQ ID NO: 4262 - DNA, 84 bp, Artificial Sequence
  Synthetic
tcaccagcagactttacgcagcttagctcttaaacccacttgccgcggctgttcccaacaaggtggacgccttagtggttcata

SEQ ID NO: 4263 - DNA, 84 bp, Artificial Sequence
  Synthetic
tcaccagcagactttacgcagcttagctcttaaactgggcgttgcggcgctgggccaacaaggtggacgccttagtggttcata

SEQ ID NO: 4264 - DNA, 84 bp, Artificial Sequence
  Synthetic
tcaccagcagactttacgcagcttagctcttaaaccttcagctcacggcaccggccaacaaggtggacgccttagtggttcata

SEQ ID NO: 4265 - DNA, 84 bp, Artificial Sequence
  Synthetic
tcaccagcagactttacgcagcttagctcttaaacacaccctgggcgttgcggcccaacaaggtggacgccttagtggttcata

SEQ ID NO: 4266 - DNA, 84 bp, Artificial Sequence
  Synthetic
tcaccagcagactttacgcagcttagctcttaaacccaaatccagatcgcgcccccaacaaggtggacgccttagtggttcata

SEQ ID NO: 4267 - DNA, 84 bp, Artificial Sequence
  Synthetic
tcaccagcagactttacgcagcttagctcttaaacgagggtcacacgcacgcccccaacaaggtggacgccttagtggttcata

SEQ ID NO: 4268 - DNA, 84 bp, Artificial Sequence
  Synthetic
tcaccagcagactttacgcagcttagctcttaaacggacgccttcttcgttcacccaacaaggtggacgccttagtggttcata

SEQ ID NO: 4269 - DNA, 84 bp, Artificial Sequence
  Synthetic
tcaccagcagactttacgcagcttagctcttaaacccatagcagtaccacgatcccaacaaggtggacgccttagtggttcata

SEQ ID NO: 4270 - DNA, 84 bp, Artificial Sequence
  Synthetic
tcaccagcagactttacgcagcttagctcttaaaccgatcctctccgccactacccaacaaggtggacgccttagtggttcata

SEQ ID NO: 4271 - DNA, 84 bp, Artificial Sequence
  Synthetic
tcaccagcagactttacgcagcttagctcttaaacctccgccactacagcaacaccaacaaggtggacgccttagtggttcata

SEQ ID NO: 4272 - DNA, 84 bp, Artificial Sequence
  Synthetic
tcaccagcagactttacgcagcttagctcttaaacaggattcgcctgcgccacgccaacaaggtggacgccttagtggttcata

SEQ ID NO: 4273 - DNA, 84 bp, Artificial Sequence
  Synthetic
tcaccagcagactttacgcagcttagctcttaaaccgctcgaccgccacaagtcccaacaaggtggacgccttagtggttcata

SEQ ID NO: 4274 - DNA, 84 bp, Artificial Sequence
  Synthetic
tcaccagcagactttacgcagcttagctcttaaacccgcgaggtccatatttgcccaacaaggtggacgccttagtggttcata

SEQ ID NO: 4275 - DNA, 84 bp, Artificial Sequence
  Synthetic
tcaccagcagactttacgcagcttagctcttaaaccacggccctcggcagcgatccaacaaggtggacgccttagtggttcata

SEQ ID NO: 4276 - DNA, 84 bp, Artificial Sequence
  Synthetic
tcaccagcagactttacgcagcttagctcttaaacctgagcccgccaagcgcggccaacaaggtggacgccttagtggttcata

SEQ ID NO: 4277 - DNA, 84 bp, Artificial Sequence
  Synthetic
tcaccagcagactttacgcagcttagctcttaaacctgatttcaccgggacctcccaacaaggtggacgccttagtggttcata

SEQ ID NO: 4278 - DNA, 84 bp, Artificial Sequence
  Synthetic
tcaccagcagactttacgcagcttagctcttaaactgaggtacgtctacttccgccaacaaggtggacgccttagtggttcata

SEQ ID NO: 4279 - DNA, 84 bp, Artificial Sequence
  Synthetic
tcaccagcagactttacgcagcttagctcttaaacgattctaacccggtccggcccaacaaggtggacgccttagtggttcata

SEQ ID NO: 4280 - DNA, 84 bp, Artificial Sequence
  Synthetic
tcaccagcagactttacgcagcttagctcttaaacacaatttctccgcggcgacccaacaaggtggacgccttagtggttcata

SEQ ID NO: 4281 - DNA, 84 bp, Artificial Sequence
  Synthetic
tcaccagcagactttacgcagcttagctcttaaacactttaagtccccgcgcgcccaacaaggtggacgccttagtggttcata

SEQ ID NO: 4282 - DNA, 84 bp, Artificial Sequence
  Synthetic
tcaccagcagactttacgcagcttagctcttaaactctatccgttgccggcagcccaacaaggtggacgccttagtggttcata

SEQ ID NO: 4283 - DNA, 84 bp, Artificial Sequence
  Synthetic
tcaccagcagactttacgcagcttagctcttaaaccgactgcaacgcgcaacccccaacaaggtggacgccttagtggttcata

SEQ ID NO: 4284 - DNA, 84 bp, Artificial Sequence
  Synthetic
tcaccagcagactttacgcagcttagctcttaaaccggcgagcttggctgcttcccaacaaggtggacgccttagtggttcata

SEQ ID NO: 4285 - DNA, 84 bp, Artificial Sequence
  Synthetic
tcaccagcagactttacgcagcttagctcttaaacctcgggctcggcttcttgcccaacaaggtggacgccttagtggttcata

SEQ ID NO: 4286 - DNA, 84 bp, Artificial Sequence
  Synthetic
tcaccagcagactttacgcagcttagctcttaaactctttccgacacacagggcccaacaaggtggacgccttagtggttcata

SEQ ID NO: 4287 - DNA, 84 bp, Artificial Sequence
  Synthetic
tcaccagcagactttacgcagcttagctcttaaactgttgtgcatcgccatgttccaacaaggtggacgccttagtggttcata

SEQ ID NO: 4288 - DNA, 84 bp, Artificial Sequence
  Synthetic
tcaccagcagactttacgcagcttagctcttaaaccagatcccggacacccggcccaacaaggtggacgccttagtggttcata

SEQ ID NO: 4289 - DNA, 84 bp, Artificial Sequence
  Synthetic
tcaccagcagactttacgcagcttagctcttaaacccgcagatcccggacacccccaacaaggtggacgccttagtggttcata

SEQ ID NO: 4290 - DNA, 84 bp, Artificial Sequence
  Synthetic
tcaccagcagactttacgcagcttagctcttaaacccgcccgcttcctgtttatccaacaaggtggacgccttagtggttcata

SEQ ID NO: 4291 - DNA, 84 bp, Artificial Sequence
  Synthetic
tcaccagcagactttacgcagcttagctcttaaaccgagctctccctctgctgcccaacaaggtggacgccttagtggttcata

SEQ ID NO: 4292 - DNA, 84 bp, Artificial Sequence
  Synthetic
tcaccagcagactttacgcagcttagctcttaaaccggctttaagctggggcgcccaacaaggtggacgccttagtggttcata

SEQ ID NO: 4293 - DNA, 84 bp, Artificial Sequence
  Synthetic
tcaccagcagactttacgcagcttagctcttaaaccgaggacctgcgggcgtcgccaacaaggtggacgccttagtggttcata

SEQ ID NO: 4294 - DNA, 84 bp, Artificial Sequence
  Synthetic
tcaccagcagactttacgcagcttagctcttaaacaggtgttgcccagcctttcccaacaaggtggacgccttagtggttcata

SEQ ID NO: 4295 - DNA, 84 bp, Artificial Sequence
  Synthetic
tcaccagcagactttacgcagcttagctcttaaaccaggtcctcgcggtgcgcaccaacaaggtggacgccttagtggttcata

SEQ ID NO: 4296 - DNA, 84 bp, Artificial Sequence
  Synthetic
tcaccagcagactttacgcagcttagctcttaaacctgtctcgtccagccgccgccaacaaggtggacgccttagtggttcata

SEQ ID NO: 4297 - DNA, 84 bp, Artificial Sequence
  Synthetic
tcaccagcagactttacgcagcttagctcttaaacccgaataacccctgccacgccaacaaggtggacgccttagtggttcata

SEQ ID NO: 4298 - DNA, 84 bp, Artificial Sequence
  Synthetic
tcaccagcagactttacgcagcttagctcttaaacccgggttccctgacgtgccccaacaaggtggacgccttagtggttcata

SEQ ID NO: 4299 - DNA, 84 bp, Artificial Sequence
  Synthetic
tcaccagcagactttacgcagcttagctcttaaacacaccaaccgcctcggacgccaacaaggtggacgccttagtggttcata

SEQ ID NO: 4300 - DNA, 84 bp, Artificial Sequence
  Synthetic
tcaccagcagactttacgcagcttagctcttaaactggatcttgaggctcgtgcccaacaaggtggacgccttagtggttcata

SEQ ID NO: 4301 - DNA, 84 bp, Artificial Sequence
  Synthetic
tcaccagcagactttacgcagcttagctcttaaacaggcggttggtgtcggagaccaacaaggtggacgccttagtggttcata

SEQ ID NO: 4302 - DNA, 84 bp, Artificial Sequence
  Synthetic
tcaccagcagactttacgcagcttagctcttaaacacggtctctagttcgcgttccaacaaggtggacgccttagtggttcata

SEQ ID NO: 4303 - DNA, 84 bp, Artificial Sequence
  Synthetic
tcaccagcagactttacgcagcttagctcttaaacgtactgaggccgctccctcccaacaaggtggacgccttagtggttcata

SEQ ID NO: 4304 - DNA, 84 bp, Artificial Sequence
  Synthetic
tcaccagcagactttacgcagcttagctcttaaactatggggcctcgtgcacgaccaacaaggtggacgccttagtggttcata

SEQ ID NO: 4305 - DNA, 84 bp, Artificial Sequence
  Synthetic
tcaccagcagactttacgcagcttagctcttaaacgtcgtacccgctcacatttccaacaaggtggacgccttagtggttcata

SEQ ID NO: 4306 - DNA, 84 bp, Artificial Sequence
  Synthetic
tcaccagcagactttacgcagcttagctcttaaacgtatcccgcgtacccggctccaacaaggtggacgccttagtggttcata

SEQ ID NO: 4307 - DNA, 84 bp, Artificial Sequence
  Synthetic
tcaccagcagactttacgcagcttagctcttaaacagccggggagggagcgttcccaacaaggtggacgccttagtggttcata

SEQ ID NO: 4308 - DNA, 84 bp, Artificial Sequence
  Synthetic
tcaccagcagactttacgcagcttagctcttaaacaccaacaggcgcttggcagccaacaaggtggacgccttagtggttcata

SEQ ID NO: 4309 - DNA, 84 bp, Artificial Sequence
  Synthetic
tcaccagcagactttacgcagcttagctcttaaacacagactctcgcaggcgccccaacaaggtggacgccttagtggttcata

SEQ ID NO: 4310 - DNA, 84 bp, Artificial Sequence
  Synthetic
tcaccagcagactttacgcagcttagctcttaaacgtgctctttcgcgaagggaccaacaaggtggacgccttagtggttcata

SEQ ID NO: 4311 - DNA, 84 bp, Artificial Sequence
  Synthetic
tcaccagcagactttacgcagcttagctcttaaacgctctacatcctgggccggccaacaaggtggacgccttagtggttcata

SEQ ID NO: 4312 - DNA, 84 bp, Artificial Sequence
  Synthetic
tcaccagcagactttacgcagcttagctcttaaacctatctcctgcgccgttagccaacaaggtggacgccttagtggttcata

SEQ ID NO: 4313 - DNA, 84 bp, Artificial Sequence
  Synthetic
tcaccagcagactttacgcagcttagctcttaaacgatttgccagcgcccgcagccaacaaggtggacgccttagtggttcata

SEQ ID NO: 4314 - DNA, 84 bp, Artificial Sequence
  Synthetic
tcaccagcagactttacgcagcttagctcttaaacaggggtgcttccgtggtcgccaacaaggtggacgccttagtggttcata

SEQ ID NO: 4315 - DNA, 84 bp, Artificial Sequence
  Synthetic
tcaccagcagactttacgcagcttagctcttaaacctaggaccggggcggagcgccaacaaggtggacgccttagtggttcata

SEQ ID NO: 4316 - DNA, 84 bp, Artificial Sequence
  Synthetic
tcaccagcagactttacgcagcttagctcttaaaccgccggggtccgagtcccaccaacaaggtggacgccttagtggttcata

SEQ ID NO: 4317 - DNA, 84 bp, Artificial Sequence
  Synthetic
tcaccagcagactttacgcagcttagctcttaaacttggtctgaccgacagactccaacaaggtggacgccttagtggttcata

SEQ ID NO: 4318 - DNA, 84 bp, Artificial Sequence
  Synthetic
tcaccagcagactttacgcagcttagctcttaaaccgttctcccaccggaactgccaacaaggtggacgccttagtggttcata

SEQ ID NO: 4319 - DNA, 84 bp, Artificial Sequence
  Synthetic
tcaccagcagactttacgcagcttagctcttaaactaccctggtccgggtggagccaacaaggtggacgccttagtggttcata

SEQ ID NO: 4320 - DNA, 84 bp, Artificial Sequence
  Synthetic
tcaccagcagactttacgcagcttagctcttaaaccggaattcaggtttacggcccaacaaggtggacgccttagtggttcata

SEQ ID NO: 4321 - DNA, 84 bp, Artificial Sequence
  Synthetic
tcaccagcagactttacgcagcttagctcttaaactgttgttttcttttcacggccaacaaggtggacgccttagtggttcata

SEQ ID NO: 4322 - DNA, 84 bp, Artificial Sequence
  Synthetic
tcaccagcagactttacgcagcttagctcttaaacttctctcccgcggaattcaccaacaaggtggacgccttagtggttcata

SEQ ID NO: 4323 - DNA, 84 bp, Artificial Sequence
  Synthetic
tcaccagcagactttacgcagcttagctcttaaacgtcggtgagcgcccaggctccaacaaggtggacgccttagtggttcata

SEQ ID NO: 4324 - DNA, 84 bp, Artificial Sequence
  Synthetic
tcaccagcagactttacgcagcttagctcttaaacgccgggggctccttgctcgccaacaaggtggacgccttagtggttcata

SEQ ID NO: 4325 - DNA, 84 bp, Artificial Sequence
  Synthetic
tcaccagcagactttacgcagcttagctcttaaaccgccatgctgggccacaagccaacaaggtggacgccttagtggttcata

SEQ ID NO: 4326 - DNA, 84 bp, Artificial Sequence
  Synthetic
tcaccagcagactttacgcagcttagctcttaaactgtcgaaacctcctcacctccaacaaggtggacgccttagtggttcata

SEQ ID NO: 4327 - DNA, 84 bp, Artificial Sequence
  Synthetic
tcaccagcagactttacgcagcttagctcttaaacctgggtcttgaacacctccccaacaaggtggacgccttagtggttcata

SEQ ID NO: 4328 - DNA, 84 bp, Artificial Sequence
  Synthetic
tcaccagcagactttacgcagcttagctcttaaaccacctcctggttgaagaaaccaacaaggtggacgccttagtggttcata

SEQ ID NO: 4329 - DNA, 84 bp, Artificial Sequence
  Synthetic
tcaccagcagactttacgcagcttagctcttaaaccagttcccaggcgtctgcgccaacaaggtggacgccttagtggttcata

SEQ ID NO: 4330 - DNA, 84 bp, Artificial Sequence
  Synthetic
tcaccagcagactttacgcagcttagctcttaaactgccatgtctcgccggaagccaacaaggtggacgccttagtggttcata

SEQ ID NO: 4331 - DNA, 84 bp, Artificial Sequence
  Synthetic
tcaccagcagactttacgcagcttagctcttaaactgtctcgccggaagcctgcccaacaaggtggacgccttagtggttcata

SEQ ID NO: 4332 - DNA, 84 bp, Artificial Sequence
  Synthetic
tcaccagcagactttacgcagcttagctcttaaaccatacttctcgggtcagggccaacaaggtggacgccttagtggttcata

SEQ ID NO: 4333 - DNA, 84 bp, Artificial Sequence
  Synthetic
tcaccagcagactttacgcagcttagctcttaaacaactacagaagctgcgccgccaacaaggtggacgccttagtggttcata

SEQ ID NO: 4334 - DNA, 84 bp, Artificial Sequence
  Synthetic
tcaccagcagactttacgcagcttagctcttaaacctccagtagcccaactacaccaacaaggtggacgccttagtggttcata

SEQ ID NO: 4335 - DNA, 84 bp, Artificial Sequence
  Synthetic
tcaccagcagactttacgcagcttagctcttaaacacctgtagcgactcaggttccaacaaggtggacgccttagtggttcata

SEQ ID NO: 4336 - DNA, 84 bp, Artificial Sequence
  Synthetic
tcaccagcagactttacgcagcttagctcttaaactaccccggcctcctctgtgccaacaaggtggacgccttagtggttcata

SEQ ID NO: 4337 - DNA, 84 bp, Artificial Sequence
  Synthetic
tcaccagcagactttacgcagcttagctcttaaacgtagcgactcaggttactgccaacaaggtggacgccttagtggttcata

SEQ ID NO: 4338 - DNA, 84 bp, Artificial Sequence
  Synthetic
tcaccagcagactttacgcagcttagctcttaaaccatctaccgcgcggctcctccaacaaggtggacgccttagtggttcata

SEQ ID NO: 4339 - DNA, 84 bp, Artificial Sequence
  Synthetic
tcaccagcagactttacgcagcttagctcttaaacttctgtcggacggagctccccaacaaggtggacgccttagtggttcata

SEQ ID NO: 4340 - DNA, 84 bp, Artificial Sequence
  Synthetic
tcaccagcagactttacgcagcttagctcttaaacaaccgttctgtcggacggaccaacaaggtggacgccttagtggttcata

SEQ ID NO: 4341 - DNA, 84 bp, Artificial Sequence
  Synthetic
tcaccagcagactttacgcagcttagctcttaaactcgcggcccccggctccttccaacaaggtggacgccttagtggttcata

SEQ ID NO: 4342 - DNA, 84 bp, Artificial Sequence
  Synthetic
tcaccagcagactttacgcagcttagctcttaaaccaccgcctttatgcccggcccaacaaggtggacgccttagtggttcata

SEQ ID NO: 4343 - DNA, 84 bp, Artificial Sequence
  Synthetic
tcaccagcagactttacgcagcttagctcttaaaccctttatgcccggccccgaccaacaaggtggacgccttagtggttcata

SEQ ID NO: 4344 - DNA, 84 bp, Artificial Sequence
  Synthetic
tcaccagcagactttacgcagcttagctcttaaaccagggttcgcctccttccgccaacaaggtggacgccttagtggttcata

SEQ ID NO: 4345 - DNA, 84 bp, Artificial Sequence
  Synthetic
tcaccagcagactttacgcagcttagctcttaaaccagccgtcgcggttcatccccaacaaggtggacgccttagtggttcata

SEQ ID NO: 4346 - DNA, 84 bp, Artificial Sequence
  Synthetic
tcaccagcagactttacgcagcttagctcttaaactcgcggttcatcccggcccccaacaaggtggacgccttagtggttcata

SEQ ID NO: 4347 - DNA, 84 bp, Artificial Sequence
  Synthetic
tcaccagcagactttacgcagcttagctcttaaacacctccgacccggtacatgccaacaaggtggacgccttagtggttcata

SEQ ID NO: 4348 - DNA, 84 bp, Artificial Sequence
  Synthetic
tcaccagcagactttacgcagcttagctcttaaacccccgtggcgaggcagcagccaacaaggtggacgccttagtggttcata

SEQ ID NO: 4349 - DNA, 84 bp, Artificial Sequence
  Synthetic
tcaccagcagactttacgcagcttagctcttaaacttggctcccggcagttggcccaacaaggtggacgccttagtggttcata

SEQ ID NO: 4350 - DNA, 84 bp, Artificial Sequence
  Synthetic
tcaccagcagactttacgcagcttagctcttaaaccctgtgtttggggccccgtccaacaaggtggacgccttagtggttcata

SEQ ID NO: 4351 - DNA, 84 bp, Artificial Sequence
  Synthetic
tcaccagcagactttacgcagcttagctcttaaacctcgttagtgccccctgtgccaacaaggtggacgccttagtggttcata

SEQ ID NO: 4352 - DNA, 84 bp, Artificial Sequence
  Synthetic
tcaccagcagactttacgcagcttagctcttaaacttgagatcacggggccccaccaacaaggtggacgccttagtggttcata

SEQ ID NO: 4353 - DNA, 84 bp, Artificial Sequence
  Synthetic
tcaccagcagactttacgcagcttagctcttaaacccgtgttctgctgtcttcaccaacaaggtggacgccttagtggttcata

SEQ ID NO: 4354 - DNA, 84 bp, Artificial Sequence
  Synthetic
tcaccagcagactttacgcagcttagctcttaaacctagaactatgagcccgagccaacaaggtggacgccttagtggttcata

SEQ ID NO: 4355 - DNA, 84 bp, Artificial Sequence
  Synthetic
tcaccagcagactttacgcagcttagctcttaaacctgaagcttgaggagcctcccaacaaggtggacgccttagtggttcata

SEQ ID NO: 4356 - DNA, 84 bp, Artificial Sequence
  Synthetic
tcaccagcagactttacgcagcttagctcttaaacgggagggtgggaagctttgccaacaaggtggacgccttagtggttcata

SEQ ID NO: 4357 - DNA, 84 bp, Artificial Sequence
  Synthetic
tcaccagcagactttacgcagcttagctcttaaacactccaccgcccgctgtgcccaacaaggtggacgccttagtggttcata

SEQ ID NO: 4358 - DNA, 84 bp, Artificial Sequence
  Synthetic
tcaccagcagactttacgcagcttagctcttaaacctcccgtttcgctgtcacaccaacaaggtggacgccttagtggttcata

SEQ ID NO: 4359 - DNA, 84 bp, Artificial Sequence
  Synthetic
tcaccagcagactttacgcagcttagctcttaaacacccctgtctacgtcggctccaacaaggtggacgccttagtggttcata

SEQ ID NO: 4360 - DNA, 84 bp, Artificial Sequence
  Synthetic
tcaccagcagactttacgcagcttagctcttaaacacccaagccagccggcaggccaacaaggtggacgccttagtggttcata

SEQ ID NO: 4361 - DNA, 84 bp, Artificial Sequence
  Synthetic
tcaccagcagactttacgcagcttagctcttaaacccggatgctgccccgtggaccaacaaggtggacgccttagtggttcata

SEQ ID NO: 4362 - DNA, 84 bp, Artificial Sequence
  Synthetic
tcaccagcagactttacgcagcttagctcttaaacacgaggagggacgaaggctccaacaaggtggacgccttagtggttcata

SEQ ID NO: 4363 - DNA, 84 bp, Artificial Sequence
  Synthetic
tcaccagcagactttacgcagcttagctcttaaactcctcgtaggcagctcctgccaacaaggtggacgccttagtggttcata

SEQ ID NO: 4364 - DNA, 84 bp, Artificial Sequence
  Synthetic
tcaccagcagactttacgcagcttagctcttaaactcgtccctcctcgtaggcaccaacaaggtggacgccttagtggttcata

SEQ ID NO: 4365 - DNA, 84 bp, Artificial Sequence
  Synthetic
tcaccagcagactttacgcagcttagctcttaaacggtcacgtagtaagcctggccaacaaggtggacgccttagtggttcata

SEQ ID NO: 4366 - DNA, 84 bp, Artificial Sequence
  Synthetic
tcaccagcagactttacgcagcttagctcttaaacctagcgtatgcctggtgtcccaacaaggtggacgccttagtggttcata

SEQ ID NO: 4367 - DNA, 84 bp, Artificial Sequence
  Synthetic
tcaccagcagactttacgcagcttagctcttaaactctcaggaactggtagacaccaacaaggtggacgccttagtggttcata

SEQ ID NO: 4368 - DNA, 84 bp, Artificial Sequence
  Synthetic
tcaccagcagactttacgcagcttagctcttaaactgaggagccggaccgatgtccaacaaggtggacgccttagtggttcata

SEQ ID NO: 4369 - DNA, 84 bp, Artificial Sequence
  Synthetic
tcaccagcagactttacgcagcttagctcttaaaccggttacgcggttgcacgtccaacaaggtggacgccttagtggttcata

SEQ ID NO: 4370 - DNA, 84 bp, Artificial Sequence
  Synthetic
tcaccagcagactttacgcagcttagctcttaaactatccgcgctcgtctagcaccaacaaggtggacgccttagtggttcata

SEQ ID NO: 4371 - DNA, 84 bp, Artificial Sequence
  Synthetic
tcaccagcagactttacgcagcttagctcttaaacggcgcctgggttacttgttccaacaaggtggacgccttagtggttcata

SEQ ID NO: 4372 - DNA, 84 bp, Artificial Sequence
  Synthetic
tcaccagcagactttacgcagcttagctcttaaacgggggcttacgcccgcggtccaacaaggtggacgccttagtggttcata

SEQ ID NO: 4373 - DNA, 84 bp, Artificial Sequence
  Synthetic
tcaccagcagactttacgcagcttagctcttaaaccgccaacccgtgcagcggtccaacaaggtggacgccttagtggttcata

SEQ ID NO: 4374 - DNA, 84 bp, Artificial Sequence
  Synthetic
tcaccagcagactttacgcagcttagctcttaaacgcactgttcgactatgagtccaacaaggtggacgccttagtggttcata

SEQ ID NO: 4375 - DNA, 84 bp, Artificial Sequence
  Synthetic
tcaccagcagactttacgcagcttagctcttaaactcttgcataatattgatctccaacaaggtggacgccttagtggttcata

SEQ ID NO: 4376 - DNA, 84 bp, Artificial Sequence
  Synthetic
tcaccagcagactttacgcagcttagctcttaaactccatggaaccaagaggctccaacaaggtggacgccttagtggttcata

SEQ ID NO: 4377 - DNA, 84 bp, Artificial Sequence
  Synthetic
tcaccagcagactttacgcagcttagctcttaaacacgcaaattaaaggcgcctccaacaaggtggacgccttagtggttcata

SEQ ID NO: 4378 - DNA, 84 bp, Artificial Sequence
  Synthetic
tcaccagcagactttacgcagcttagctcttaaacccttcttctgcgttaccctccaacaaggtggacgccttagtggttcata

SEQ ID NO: 4379 - DNA, 84 bp, Artificial Sequence
  Synthetic
tcaccagcagactttacgcagcttagctcttaaacccccggcgacggggcacctccaacaaggtggacgccttagtggttcata

SEQ ID NO: 4380 - DNA, 84 bp, Artificial Sequence
  Synthetic
tcaccagcagactttacgcagcttagctcttaaacggccgcgcgttgcgcgactccaacaaggtggacgccttagtggttcata

SEQ ID NO: 4381 - DNA, 84 bp, Artificial Sequence
  Synthetic
tcaccagcagactttacgcagcttagctcttaaacgctctttctctgggggctgccaacaaggtggacgccttagtggttcata

SEQ ID NO: 4382 - DNA, 84 bp, Artificial Sequence
  Synthetic
tcaccagcagactttacgcagcttagctcttaaacttcttagcagggcggcctgccaacaaggtggacgccttagtggttcata

SEQ ID NO: 4383 - DNA, 84 bp, Artificial Sequence
  Synthetic
tcaccagcagactttacgcagcttagctcttaaacacgcctccgccgaggactgccaacaaggtggacgccttagtggttcata

SEQ ID NO: 4384 - DNA, 84 bp, Artificial Sequence
  Synthetic
tcaccagcagactttacgcagcttagctcttaaactgtttatatctagcgttggccaacaaggtggacgccttagtggttcata

SEQ ID NO: 4385 - DNA, 84 bp, Artificial Sequence
  Synthetic
tcaccagcagactttacgcagcttagctcttaaacgagacgcctttccgcggggccaacaaggtggacgccttagtggttcata

SEQ ID NO: 4386 - DNA, 84 bp, Artificial Sequence
  Synthetic
tcaccagcagactttacgcagcttagctcttaaacctgttcgggaatcgaggggccaacaaggtggacgccttagtggttcata

SEQ ID NO: 4387 - DNA, 84 bp, Artificial Sequence
  Synthetic
tcaccagcagactttacgcagcttagctcttaaactcttacgcttgagcttcggccaacaaggtggacgccttagtggttcata

SEQ ID NO: 4388 - DNA, 84 bp, Artificial Sequence
  Synthetic
tcaccagcagactttacgcagcttagctcttaaaccaaactgcccaactgccggccaacaaggtggacgccttagtggttcata

SEQ ID NO: 4389 - DNA, 84 bp, Artificial Sequence
  Synthetic
tcaccagcagactttacgcagcttagctcttaaacaaccgaatcccacgtaaggccaacaaggtggacgccttagtggttcata

SEQ ID NO: 4390 - DNA, 84 bp, Artificial Sequence
  Synthetic
tcaccagcagactttacgcagcttagctcttaaacccacatgtaaccgatgtcgccaacaaggtggacgccttagtggttcata

SEQ ID NO: 4391 - DNA, 84 bp, Artificial Sequence
  Synthetic
tcaccagcagactttacgcagcttagctcttaaacttgatgtgctattccggcgccaacaaggtggacgccttagtggttcata

SEQ ID NO: 4392 - DNA, 84 bp, Artificial Sequence
  Synthetic
tcaccagcagactttacgcagcttagctcttaaacctggtgtcgcgtcttcgcgccaacaaggtggacgccttagtggttcata

SEQ ID NO: 4393 - DNA, 84 bp, Artificial Sequence
  Synthetic
tcaccagcagactttacgcagcttagctcttaaacgacagtccgaatgggcgcgccaacaaggtggacgccttagtggttcata

SEQ ID NO: 4394 - DNA, 84 bp, Artificial Sequence
  Synthetic
tcaccagcagactttacgcagcttagctcttaaactcgccgtggggggaatccgccaacaaggtggacgccttagtggttcata

SEQ ID NO: 4395 - DNA, 84 bp, Artificial Sequence
  Synthetic
tcaccagcagactttacgcagcttagctcttaaacccgagtgtggacatccccgccaacaaggtggacgccttagtggttcata

SEQ ID NO: 4396 - DNA, 84 bp, Artificial Sequence
  Synthetic
tcaccagcagactttacgcagcttagctcttaaactaggttggcttccccgacgccaacaaggtggacgccttagtggttcata

SEQ ID NO: 4397 - DNA, 84 bp, Artificial Sequence
  Synthetic
tcaccagcagactttacgcagcttagctcttaaaccgtggttgagtcatctcagccaacaaggtggacgccttagtggttcata

SEQ ID NO: 4398 - DNA, 84 bp, Artificial Sequence
  Synthetic
tcaccagcagactttacgcagcttagctcttaaacgggtcatttacggtatcagccaacaaggtggacgccttagtggttcata

SEQ ID NO: 4399 - DNA, 84 bp, Artificial Sequence
  Synthetic
tcaccagcagactttacgcagcttagctcttaaaccggaggtttagtagtgcagccaacaaggtggacgccttagtggttcata

SEQ ID NO: 4400 - DNA, 84 bp, Artificial Sequence
  Synthetic
tcaccagcagactttacgcagcttagctcttaaactctccttgcggtaataaagccaacaaggtggacgccttagtggttcata

SEQ ID NO: 4401 - DNA, 84 bp, Artificial Sequence
  Synthetic
tcaccagcagactttacgcagcttagctcttaaacacgggttccctgtcgtttcccaacaaggtggacgccttagtggttcata

SEQ ID NO: 4402 - DNA, 84 bp, Artificial Sequence
  Synthetic
tcaccagcagactttacgcagcttagctcttaaactattgtactctgggccgtcccaacaaggtggacgccttagtggttcata

SEQ ID NO: 4403 - DNA, 84 bp, Artificial Sequence
  Synthetic
tcaccagcagactttacgcagcttagctcttaaacgcaagcgccacgagtagtcccaacaaggtggacgccttagtggttcata

SEQ ID NO: 4404 - DNA, 84 bp, Artificial Sequence
  Synthetic
tcaccagcagactttacgcagcttagctcttaaacctattttcgtggcgcgatcccaacaaggtggacgccttagtggttcata

SEQ ID NO: 4405 - DNA, 84 bp, Artificial Sequence
  Synthetic
tcaccagcagactttacgcagcttagctcttaaacgcggcatgccggtcgctgcccaacaaggtggacgccttagtggttcata

SEQ ID NO: 4406 - DNA, 84 bp, Artificial Sequence
  Synthetic
tcaccagcagactttacgcagcttagctcttaaacacgtgatcggtttggcggcccaacaaggtggacgccttagtggttcata

SEQ ID NO: 4407 - DNA, 84 bp, Artificial Sequence
  Synthetic
tcaccagcagactttacgcagcttagctcttaaacggcagtgtcgcgccgacgcccaacaaggtggacgccttagtggttcata

SEQ ID NO: 4408 - DNA, 84 bp, Artificial Sequence
  Synthetic
tcaccagcagactttacgcagcttagctcttaaaccgtgcgcggcgcacgcagcccaacaaggtggacgccttagtggttcata

SEQ ID NO: 4409 - DNA, 84 bp, Artificial Sequence
  Synthetic
tcaccagcagactttacgcagcttagctcttaaacttgctcggactcgacaagcccaacaaggtggacgccttagtggttcata

SEQ ID NO: 4410 - DNA, 84 bp, Artificial Sequence
  Synthetic
tcaccagcagactttacgcagcttagctcttaaaccgggttttacactggagccccaacaaggtggacgccttagtggttcata

SEQ ID NO: 4411 - DNA, 84 bp, Artificial Sequence
  Synthetic
tcaccagcagactttacgcagcttagctcttaaacccaattgtctcccatccccccaacaaggtggacgccttagtggttcata

SEQ ID NO: 4412 - DNA, 84 bp, Artificial Sequence
  Synthetic
tcaccagcagactttacgcagcttagctcttaaactaccgtgtggattcgacccccaacaaggtggacgccttagtggttcata

SEQ ID NO: 4413 - DNA, 84 bp, Artificial Sequence
  Synthetic
tcaccagcagactttacgcagcttagctcttaaacctgatggagcgaagctaccccaacaaggtggacgccttagtggttcata

SEQ ID NO: 4414 - DNA, 84 bp, Artificial Sequence
  Synthetic
tcaccagcagactttacgcagcttagctcttaaactgttgttcccagtgcgaccccaacaaggtggacgccttagtggttcata

SEQ ID NO: 4415 - DNA, 84 bp, Artificial Sequence
  Synthetic
tcaccagcagactttacgcagcttagctcttaaacgaccagccggtacgagaccccaacaaggtggacgccttagtggttcata

SEQ ID NO: 4416 - DNA, 84 bp, Artificial Sequence
  Synthetic
tcaccagcagactttacgcagcttagctcttaaaccccttccgcgtgacccaccccaacaaggtggacgccttagtggttcata

SEQ ID NO: 4417 - DNA, 84 bp, Artificial Sequence
  Synthetic
tcaccagcagactttacgcagcttagctcttaaacgccggtagtgtgcctggacccaacaaggtggacgccttagtggttcata

SEQ ID NO: 4418 - DNA, 84 bp, Artificial Sequence
  Synthetic
tcaccagcagactttacgcagcttagctcttaaacgagcctgggctgttcggacccaacaaggtggacgccttagtggttcata

SEQ ID NO: 4419 - DNA, 84 bp, Artificial Sequence
  Synthetic
tcaccagcagactttacgcagcttagctcttaaacccctcgggcggttccggacccaacaaggtggacgccttagtggttcata

SEQ ID NO: 4420 - DNA, 84 bp, Artificial Sequence
  Synthetic
tcaccagcagactttacgcagcttagctcttaaacaaagctgccttcgaaagacccaacaaggtggacgccttagtggttcata

SEQ ID NO: 4421 - DNA, 84 bp, Artificial Sequence
  Synthetic
tcaccagcagactttacgcagcttagctcttaaacttggcccagtacagccaacccaacaaggtggacgccttagtggttcata

SEQ ID NO: 4422 - DNA, 84 bp, Artificial Sequence
  Synthetic
tcaccagcagactttacgcagcttagctcttaaacccgtgacgggtcgtccttaccaacaaggtggacgccttagtggttcata

SEQ ID NO: 4423 - DNA, 84 bp, Artificial Sequence
  Synthetic
tcaccagcagactttacgcagcttagctcttaaactgcgcttatgcgctggtgaccaacaaggtggacgccttagtggttcata

SEQ ID NO: 4424 - DNA, 84 bp, Artificial Sequence
  Synthetic
tcaccagcagactttacgcagcttagctcttaaacagcgatctgcggcccaggaccaacaaggtggacgccttagtggttcata

SEQ ID NO: 4425 - DNA, 84 bp, Artificial Sequence
  Synthetic
tcaccagcagactttacgcagcttagctcttaaacgcccgtctctctctccagaccaacaaggtggacgccttagtggttcata

SEQ ID NO: 4426 - DNA, 84 bp, Artificial Sequence
  Synthetic
tcaccagcagactttacgcagcttagctcttaaacccgacagaggcggactccaccaacaaggtggacgccttagtggttcata

SEQ ID NO: 4427 - DNA, 84 bp, Artificial Sequence
  Synthetic
tcaccagcagactttacgcagcttagctcttaaacacctacgatcggggggccaccaacaaggtggacgccttagtggttcata

SEQ ID NO: 4428 - DNA, 84 bp, Artificial Sequence
  Synthetic
tcaccagcagactttacgcagcttagctcttaaacctattggcttgttcaaccaccaacaaggtggacgccttagtggttcata

SEQ ID NO: 4429 - DNA, 84 bp, Artificial Sequence
  Synthetic
tcaccagcagactttacgcagcttagctcttaaactcgaacccttacgccctaaccaacaaggtggacgccttagtggttcata

SEQ ID NO: 4430 - DNA, 84 bp, Artificial Sequence
  Synthetic
tcaccagcagactttacgcagcttagctcttaaacccaatcgaggggtaaccaaccaacaaggtggacgccttagtggttcata

SEQ ID NO: 4431 - DNA, 84 bp, Artificial Sequence
  Synthetic
tcaccagcagactttacgcagcttagctcttaaacaccctgtcccacgctagctccaacaaggtggacgccttagtggttcata

SEQ ID NO: 4432 - DNA, 84 bp, Artificial Sequence
  Synthetic
tcaccagcagactttacgcagcttagctcttaaacacttgagatggttctgttgccaacaaggtggacgccttagtggttcata

SEQ ID NO: 4433 - DNA, 84 bp, Artificial Sequence
  Synthetic
tcaccagcagactttacgcagcttagctcttaaactagggcctgtgcgtaccgcccaacaaggtggacgccttagtggttcata

SEQ ID NO: 4434 - DNA, 84 bp, Artificial Sequence
  Synthetic
tcaccagcagactttacgcagcttagctcttaaactccggtagatctgcggcctccaacaaggtggacgccttagtggttcata

SEQ ID NO: 4435 - DNA, 84 bp, Artificial Sequence
  Synthetic
tcaccagcagactttacgcagcttagctcttaaacccagctggagcggctgtgcccaacaaggtggacgccttagtggttcata

SEQ ID NO: 4436 - DNA, 84 bp, Artificial Sequence
  Synthetic
tcaccagcagactttacgcagcttagctcttaaacgtgagtgcagccgcccgccccaacaaggtggacgccttagtggttcata

SEQ ID NO: 4437 - DNA, 84 bp, Artificial Sequence
  Synthetic
tcaccagcagactttacgcagcttagctcttaaacaccgattgcagggcctggtccaacaaggtggacgccttagtggttcata

SEQ ID NO: 4438 - DNA, 84 bp, Artificial Sequence
  Synthetic
tcaccagcagactttacgcagcttagctcttaaaccagtgccggccacagagatccaacaaggtggacgccttagtggttcata

SEQ ID NO: 4439 - DNA, 84 bp, Artificial Sequence
  Synthetic
tcaccagcagactttacgcagcttagctcttaaacattgcagggcctggtgagaccaacaaggtggacgccttagtggttcata

SEQ ID NO: 4440 - DNA, 84 bp, Artificial Sequence
  Synthetic
tcaccagcagactttacgcagcttagctcttaaaccctaacccgcagcccttctccaacaaggtggacgccttagtggttcata

SEQ ID NO: 4441 - DNA, 84 bp, Artificial Sequence
  Synthetic
tcaccagcagactttacgcagcttagctcttaaaccgggctcccagacgcactcccaacaaggtggacgccttagtggttcata

SEQ ID NO: 4442 - DNA, 84 bp, Artificial Sequence
  Synthetic
tcaccagcagactttacgcagcttagctcttaaacagacgcactcgctcccgcaccaacaaggtggacgccttagtggttcata

SEQ ID NO: 4443 - DNA, 84 bp, Artificial Sequence
  Synthetic
tcaccagcagactttacgcagcttagctcttaaacttcggtttgcgcgagcgggccaacaaggtggacgccttagtggttcata

SEQ ID NO: 4444 - DNA, 84 bp, Artificial Sequence
  Synthetic
tcaccagcagactttacgcagcttagctcttaaaccttactctaggcctttcggccaacaaggtggacgccttagtggttcata

SEQ ID NO: 4445 - DNA, 84 bp, Artificial Sequence
  Synthetic
tcaccagcagactttacgcagcttagctcttaaacactctcttagccgcacgcaccaacaaggtggacgccttagtggttcata

SEQ ID NO: 4446 - DNA, 84 bp, Artificial Sequence
  Synthetic
tcaccagcagactttacgcagcttagctcttaaactccctgcggcttggtggtgccaacaaggtggacgccttagtggttcata

SEQ ID NO: 4447 - DNA, 84 bp, Artificial Sequence
  Synthetic
tcaccagcagactttacgcagcttagctcttaaactccgtcggtaccgactcacccaacaaggtggacgccttagtggttcata

SEQ ID NO: 4448 - DNA, 84 bp, Artificial Sequence
  Synthetic
tcaccagcagactttacgcagcttagctcttaaacctccctccgtcggtaccgaccaacaaggtggacgccttagtggttcata

SEQ ID NO: 4449 - DNA, 84 bp, Artificial Sequence
  Synthetic
tcaccagcagactttacgcagcttagctcttaaaccaggagtccggcatgaccgccaacaaggtggacgccttagtggttcata

SEQ ID NO: 4450 - DNA, 84 bp, Artificial Sequence
  Synthetic
tcaccagcagactttacgcagcttagctcttaaaccgggggtgtagggaggagcccaacaaggtggacgccttagtggttcata

SEQ ID NO: 4451 - DNA, 84 bp, Artificial Sequence
  Synthetic
tcaccagcagactttacgcagcttagctcttaaacctcttctccggagaggcccccaacaaggtggacgccttagtggttcata

SEQ ID NO: 4452 - DNA, 84 bp, Artificial Sequence
  Synthetic
tcaccagcagactttacgcagcttagctcttaaaccttccgggggcgtggcctcccaacaaggtggacgccttagtggttcata

SEQ ID NO: 4453 - DNA, 84 bp, Artificial Sequence
  Synthetic
tcaccagcagactttacgcagcttagctcttaaactccctggtcaccacgactcccaacaaggtggacgccttagtggttcata

SEQ ID NO: 4454 - DNA, 84 bp, Artificial Sequence
  Synthetic
tcaccagcagactttacgcagcttagctcttaaacccgcttccgggggcgtggcccaacaaggtggacgccttagtggttcata

SEQ ID NO: 4455 - DNA, 84 bp, Artificial Sequence
  Synthetic
tcaccagcagactttacgcagcttagctcttaaaccgtagtagccccgcctaccccaacaaggtggacgccttagtggttcata

SEQ ID NO: 4456 - DNA, 84 bp, Artificial Sequence
  Synthetic
tcaccagcagactttacgcagcttagctcttaaacaggcgcatggggcatcgtaccaacaaggtggacgccttagtggttcata

SEQ ID NO: 4457 - DNA, 84 bp, Artificial Sequence
  Synthetic
tcaccagcagactttacgcagcttagctcttaaactcccgtgccctcgctctgaccaacaaggtggacgccttagtggttcata

SEQ ID NO: 4458 - DNA, 84 bp, Artificial Sequence
  Synthetic
tcaccagcagactttacgcagcttagctcttaaacattccttcctggggcgcctccaacaaggtggacgccttagtggttcata

SEQ ID NO: 4459 - DNA, 84 bp, Artificial Sequence
  Synthetic
tcaccagcagactttacgcagcttagctcttaaacaaactccggccaattaaatccaacaaggtggacgccttagtggttcata

SEQ ID NO: 4460 - DNA, 84 bp, Artificial Sequence
  Synthetic
tcaccagcagactttacgcagcttagctcttaaactgggaaagcggggtcagagccaacaaggtggacgccttagtggttcata

SEQ ID NO: 4461 - DNA, 84 bp, Artificial Sequence
  Synthetic
tcaccagcagactttacgcagcttagctcttaaacataaacaggcaagcatggtccaacaaggtggacgccttagtggttcata

SEQ ID NO: 4462 - DNA, 84 bp, Artificial Sequence
  Synthetic
tcaccagcagactttacgcagcttagctcttaaacgtttatgggccctgtgtctccaacaaggtggacgccttagtggttcata

SEQ ID NO: 4463 - DNA, 84 bp, Artificial Sequence
  Synthetic
tcaccagcagactttacgcagcttagctcttaaacttagagacattctactaggccaacaaggtggacgccttagtggttcata

SEQ ID NO: 4464 - DNA, 84 bp, Artificial Sequence
  Synthetic
tcaccagcagactttacgcagcttagctcttaaacgcggctgggtgagcgcacgccaacaaggtggacgccttagtggttcata

SEQ ID NO: 4465 - DNA, 84 bp, Artificial Sequence
  Synthetic
tcaccagcagactttacgcagcttagctcttaaacccgttccctgatagattgcccaacaaggtggacgccttagtggttcata

SEQ ID NO: 4466 - DNA, 84 bp, Artificial Sequence
  Synthetic
tcaccagcagactttacgcagcttagctcttaaacccgaacacgccgcaccggcccaacaaggtggacgccttagtggttcata

SEQ ID NO: 4467 - DNA, 84 bp, Artificial Sequence
  Synthetic
tcaccagcagactttacgcagcttagctcttaaacgtgctccgtcgccgccgcgccaacaaggtggacgccttagtggttcata

SEQ ID NO: 4468 - DNA, 84 bp, Artificial Sequence
  Synthetic
tcaccagcagactttacgcagcttagctcttaaacccgccggtgctccgtcgccccaacaaggtggacgccttagtggttcata

SEQ ID NO: 4469 - DNA, 84 bp, Artificial Sequence
  Synthetic
tcaccagcagactttacgcagcttagctcttaaacccggtgctccgtcgccgccccaacaaggtggacgccttagtggttcata

SEQ ID NO: 4470 - DNA, 84 bp, Artificial Sequence
  Synthetic
tcaccagcagactttacgcagcttagctcttaaactgggactggtcgcctgactccaacaaggtggacgccttagtggttcata

SEQ ID NO: 4471 - DNA, 84 bp, Artificial Sequence
  Synthetic
tcaccagcagactttacgcagcttagctcttaaacgtgtgtcctgaggggtaggccaacaaggtggacgccttagtggttcata

SEQ ID NO: 4472 - DNA, 84 bp, Artificial Sequence
  Synthetic
tcaccagcagactttacgcagcttagctcttaaactagcgctgctcatgtggccccaacaaggtggacgccttagtggttcata

SEQ ID NO: 4473 - DNA, 84 bp, Artificial Sequence
  Synthetic
tcaccagcagactttacgcagcttagctcttaaacctgaatacagttcaaacctccaacaaggtggacgccttagtggttcata

SEQ ID NO: 4474 - DNA, 84 bp, Artificial Sequence
  Synthetic
tcaccagcagactttacgcagcttagctcttaaacaacgggatgccctcccgcgccaacaaggtggacgccttagtggttcata

SEQ ID NO: 4475 - DNA, 84 bp, Artificial Sequence
  Synthetic
tcaccagcagactttacgcagcttagctcttaaacctaatcacgtaagtctcgcccaacaaggtggacgccttagtggttcata

SEQ ID NO: 4476 - DNA, 84 bp, Artificial Sequence
  Synthetic
tcaccagcagactttacgcagcttagctcttaaacccctgaacatctcctcaggccaacaaggtggacgccttagtggttcata

SEQ ID NO: 4477 - DNA, 84 bp, Artificial Sequence
  Synthetic
tcaccagcagactttacgcagcttagctcttaaacacatgatcgcggcggcccgccaacaaggtggacgccttagtggttcata

SEQ ID NO: 4478 - DNA, 84 bp, Artificial Sequence
  Synthetic
tcaccagcagactttacgcagcttagctcttaaaccgatcatgtcggaccaggcccaacaaggtggacgccttagtggttcata

SEQ ID NO: 4479 - DNA, 84 bp, Artificial Sequence
  Synthetic
tcaccagcagactttacgcagcttagctcttaaacttacccctcccggtgccgcccaacaaggtggacgccttagtggttcata

SEQ ID NO: 4480 - DNA, 84 bp, Artificial Sequence
  Synthetic
tcaccagcagactttacgcagcttagctcttaaactcgcttcggcacccgccgcccaacaaggtggacgccttagtggttcata

SEQ ID NO: 4481 - DNA, 84 bp, Artificial Sequence
  Synthetic
tcaccagcagactttacgcagcttagctcttaaacctcccggtgccgccgcaaaccaacaaggtggacgccttagtggttcata

SEQ ID NO: 4482 - DNA, 84 bp, Artificial Sequence
  Synthetic
tcaccagcagactttacgcagcttagctcttaaactcacgtggactcgcctgacccaacaaggtggacgccttagtggttcata

SEQ ID NO: 4483 - DNA, 84 bp, Artificial Sequence
  Synthetic
tcaccagcagactttacgcagcttagctcttaaacctgaggagacgccatcttaccaacaaggtggacgccttagtggttcata

SEQ ID NO: 4484 - DNA, 84 bp, Artificial Sequence
  Synthetic
tcaccagcagactttacgcagcttagctcttaaaccaggggggccagattgcgaccaacaaggtggacgccttagtggttcata

SEQ ID NO: 4485 - DNA, 84 bp, Artificial Sequence
  Synthetic
tcaccagcagactttacgcagcttagctcttaaacttcttaccgtaggtttctcccaacaaggtggacgccttagtggttcata

SEQ ID NO: 4486 - DNA, 84 bp, Artificial Sequence
  Synthetic
tcaccagcagactttacgcagcttagctcttaaactgtcgctcgcccgggcggcccaacaaggtggacgccttagtggttcata

SEQ ID NO: 4487 - DNA, 84 bp, Artificial Sequence
  Synthetic
tcaccagcagactttacgcagcttagctcttaaactaggtttctcccctcccgcccaacaaggtggacgccttagtggttcata

SEQ ID NO: 4488 - DNA, 84 bp, Artificial Sequence
  Synthetic
tcaccagcagactttacgcagcttagctcttaaacgaggcccccagcttcgcggccaacaaggtggacgccttagtggttcata

SEQ ID NO: 4489 - DNA, 84 bp, Artificial Sequence
  Synthetic
tcaccagcagactttacgcagcttagctcttaaactctggccggcgaccaggagccaacaaggtggacgccttagtggttcata

SEQ ID NO: 4490 - DNA, 84 bp, Artificial Sequence
  Synthetic
tcaccagcagactttacgcagcttagctcttaaacccgagtgaccccagctcgaccaacaaggtggacgccttagtggttcata

SEQ ID NO: 4491 - DNA, 84 bp, Artificial Sequence
  Synthetic
tcaccagcagactttacgcagcttagctcttaaaccttgggggggacccagaggccaacaaggtggacgccttagtggttcata

SEQ ID NO: 4492 - DNA, 84 bp, Artificial Sequence
  Synthetic
tcaccagcagactttacgcagcttagctcttaaaccctcttgggggggacccagccaacaaggtggacgccttagtggttcata

SEQ ID NO: 4493 - DNA, 84 bp, Artificial Sequence
  Synthetic
tcaccagcagactttacgcagcttagctcttaaacgacgggcttttttctcctcccaacaaggtggacgccttagtggttcata

SEQ ID NO: 4494 - DNA, 84 bp, Artificial Sequence
  Synthetic
tcaccagcagactttacgcagcttagctcttaaactgtcgggcctgagccgagtccaacaaggtggacgccttagtggttcata

SEQ ID NO: 4495 - DNA, 84 bp, Artificial Sequence
  Synthetic
tcaccagcagactttacgcagcttagctcttaaacttggaggcggcaccggaccccaacaaggtggacgccttagtggttcata

SEQ ID NO: 4496 - DNA, 84 bp, Artificial Sequence
  Synthetic
tcaccagcagactttacgcagcttagctcttaaaccctccaagggcaactccacccaacaaggtggacgccttagtggttcata

SEQ ID NO: 4497 - DNA, 84 bp, Artificial Sequence
  Synthetic
tcaccagcagactttacgcagcttagctcttaaactgatctctggacccacactccaacaaggtggacgccttagtggttcata

SEQ ID NO: 4498 - DNA, 84 bp, Artificial Sequence
  Synthetic
tcaccagcagactttacgcagcttagctcttaaacttgatttgcaccttatctgccaacaaggtggacgccttagtggttcata

SEQ ID NO: 4499 - DNA, 84 bp, Artificial Sequence
  Synthetic
tcaccagcagactttacgcagcttagctcttaaacggtgtctctcccgaccatgccaacaaggtggacgccttagtggttcata

SEQ ID NO: 4500 - DNA, 84 bp, Artificial Sequence
  Synthetic
tcaccagcagactttacgcagcttagctcttaaaccgcctggtgtctctcccgaccaacaaggtggacgccttagtggttcata

SEQ ID NO: 4501 - DNA, 84 bp, Artificial Sequence
  Synthetic
tcaccagcagactttacgcagcttagctcttaaaccctccatggtcgggagagaccaacaaggtggacgccttagtggttcata

SEQ ID NO: 4502 - DNA, 84 bp, Artificial Sequence
  Synthetic
tcaccagcagactttacgcagcttagctcttaaacgctcgctctgaggctcctgccaacaaggtggacgccttagtggttcata

SEQ ID NO: 4503 - DNA, 84 bp, Artificial Sequence
  Synthetic
tcaccagcagactttacgcagcttagctcttaaaccgttgcgacgtcaccacgcccaacaaggtggacgccttagtggttcata

SEQ ID NO: 4504 - DNA, 84 bp, Artificial Sequence
  Synthetic
tcaccagcagactttacgcagcttagctcttaaacgtcgtcgcgacgttcgcccccaacaaggtggacgccttagtggttcata

SEQ ID NO: 4505 - DNA, 84 bp, Artificial Sequence
  Synthetic
tcaccagcagactttacgcagcttagctcttaaacccgccgcatccaatcgcctccaacaaggtggacgccttagtggttcata

SEQ ID NO: 4506 - DNA, 84 bp, Artificial Sequence
  Synthetic
tcaccagcagactttacgcagcttagctcttaaacggttgccgactcgctactcccaacaaggtggacgccttagtggttcata

SEQ ID NO: 4507 - DNA, 84 bp, Artificial Sequence
  Synthetic
tcaccagcagactttacgcagcttagctcttaaacccgggttgccgactcgctaccaacaaggtggacgccttagtggttcata

SEQ ID NO: 4508 - DNA, 84 bp, Artificial Sequence
  Synthetic
tcaccagcagactttacgcagcttagctcttaaactccccgagcactcaccgctccaacaaggtggacgccttagtggttcata

SEQ ID NO: 4509 - DNA, 84 bp, Artificial Sequence
  Synthetic
tcaccagcagactttacgcagcttagctcttaaacccccgtccctctagacctgccaacaaggtggacgccttagtggttcata

SEQ ID NO: 4510 - DNA, 84 bp, Artificial Sequence
  Synthetic
tcaccagcagactttacgcagcttagctcttaaacgagcactcaccgctcggcgccaacaaggtggacgccttagtggttcata

SEQ ID NO: 4511 - DNA, 84 bp, Artificial Sequence
  Synthetic
tcaccagcagactttacgcagcttagctcttaaacacctggtcgcaggagtgtcccaacaaggtggacgccttagtggttcata

SEQ ID NO: 4512 - DNA, 84 bp, Artificial Sequence
  Synthetic
tcaccagcagactttacgcagcttagctcttaaacagtggaagctccaccgggcccaacaaggtggacgccttagtggttcata

SEQ ID NO: 4513 - DNA, 84 bp, Artificial Sequence
  Synthetic
tcaccagcagactttacgcagcttagctcttaaacggtaggcatctctgcggccccaacaaggtggacgccttagtggttcata

SEQ ID NO: 4514 - DNA, 84 bp, Artificial Sequence
  Synthetic
tcaccagcagactttacgcagcttagctcttaaacagttctgctcgccggttggccaacaaggtggacgccttagtggttcata

SEQ ID NO: 4515 - DNA, 84 bp, Artificial Sequence
  Synthetic
tcaccagcagactttacgcagcttagctcttaaaccggaagcacctccccgcagccaacaaggtggacgccttagtggttcata

SEQ ID NO: 4516 - DNA, 84 bp, Artificial Sequence
  Synthetic
tcaccagcagactttacgcagcttagctcttaaacctccgagaggtgcgttcccccaacaaggtggacgccttagtggttcata

SEQ ID NO: 4517 - DNA, 84 bp, Artificial Sequence
  Synthetic
tcaccagcagactttacgcagcttagctcttaaaccattgtctccgcggcggctccaacaaggtggacgccttagtggttcata

SEQ ID NO: 4518 - DNA, 84 bp, Artificial Sequence
  Synthetic
tcaccagcagactttacgcagcttagctcttaaactcccagactcgccgcattgccaacaaggtggacgccttagtggttcata

SEQ ID NO: 4519 - DNA, 84 bp, Artificial Sequence
  Synthetic
tcaccagcagactttacgcagcttagctcttaaaccggcggctgcagccctcgaccaacaaggtggacgccttagtggttcata

SEQ ID NO: 4520 - DNA, 84 bp, Artificial Sequence
  Synthetic
tcaccagcagactttacgcagcttagctcttaaactctagtcactcactccgctccaacaaggtggacgccttagtggttcata

SEQ ID NO: 4521 - DNA, 84 bp, Artificial Sequence
  Synthetic
tcaccagcagactttacgcagcttagctcttaaaccccctagttacgacatcagccaacaaggtggacgccttagtggttcata

SEQ ID NO: 4522 - DNA, 84 bp, Artificial Sequence
  Synthetic
tcaccagcagactttacgcagcttagctcttaaactcactaacatgggctgcgcccaacaaggtggacgccttagtggttcata

SEQ ID NO: 4523 - DNA, 84 bp, Artificial Sequence
  Synthetic
tcaccagcagactttacgcagcttagctcttaaacccgctgggcctcctccattccaacaaggtggacgccttagtggttcata

SEQ ID NO: 4524 - DNA, 84 bp, Artificial Sequence
  Synthetic
tcaccagcagactttacgcagcttagctcttaaaccacggcccggcgttgtactccaacaaggtggacgccttagtggttcata

SEQ ID NO: 4525 - DNA, 84 bp, Artificial Sequence
  Synthetic
tcaccagcagactttacgcagcttagctcttaaacccggtctcaggcgcggcgcccaacaaggtggacgccttagtggttcata

SEQ ID NO: 4526 - DNA, 84 bp, Artificial Sequence
  Synthetic
tcaccagcagactttacgcagcttagctcttaaacctacctccggactccctatccaacaaggtggacgccttagtggttcata

SEQ ID NO: 4527 - DNA, 84 bp, Artificial Sequence
  Synthetic
tcaccagcagactttacgcagcttagctcttaaacttagttccgcactgtccgcccaacaaggtggacgccttagtggttcata

SEQ ID NO: 4528 - DNA, 84 bp, Artificial Sequence
  Synthetic
tcaccagcagactttacgcagcttagctcttaaacccatcttgcgtctgtcagcccaacaaggtggacgccttagtggttcata

SEQ ID NO: 4529 - DNA, 84 bp, Artificial Sequence
  Synthetic
tcaccagcagactttacgcagcttagctcttaaacaagtgagtgagcggtggcgccaacaaggtggacgccttagtggttcata

SEQ ID NO: 4530 - DNA, 84 bp, Artificial Sequence
  Synthetic
tcaccagcagactttacgcagcttagctcttaaactcttggtcaccagcgtcccccaacaaggtggacgccttagtggttcata

SEQ ID NO: 4531 - DNA, 84 bp, Artificial Sequence
  Synthetic
tcaccagcagactttacgcagcttagctcttaaacgcgcgggggacgctggtgaccaacaaggtggacgccttagtggttcata

SEQ ID NO: 4532 - DNA, 84 bp, Artificial Sequence
  Synthetic
tcaccagcagactttacgcagcttagctcttaaacctgggttcgggcagacactccaacaaggtggacgccttagtggttcata

SEQ ID NO: 4533 - DNA, 84 bp, Artificial Sequence
  Synthetic
tcaccagcagactttacgcagcttagctcttaaacagaggtggggagcaaagagccaacaaggtggacgccttagtggttcata

SEQ ID NO: 4534 - DNA, 84 bp, Artificial Sequence
  Synthetic
tcaccagcagactttacgcagcttagctcttaaaccctctgggttcgggcagacccaacaaggtggacgccttagtggttcata

SEQ ID NO: 4535 - DNA, 84 bp, Artificial Sequence
  Synthetic
tcaccagcagactttacgcagcttagctcttaaacttctttcccgtcctcactgccaacaaggtggacgccttagtggttcata

SEQ ID NO: 4536 - DNA, 84 bp, Artificial Sequence
  Synthetic
tcaccagcagactttacgcagcttagctcttaaaccttcctgcgcacattgcgcccaacaaggtggacgccttagtggttcata

SEQ ID NO: 4537 - DNA, 84 bp, Artificial Sequence
  Synthetic
tcaccagcagactttacgcagcttagctcttaaaccactgtgctaggctcggccccaacaaggtggacgccttagtggttcata

SEQ ID NO: 4538 - DNA, 84 bp, Artificial Sequence
  Synthetic
tcaccagcagactttacgcagcttagctcttaaacaagctgcgctgcagacctcccaacaaggtggacgccttagtggttcata

SEQ ID NO: 4539 - DNA, 84 bp, Artificial Sequence
  Synthetic
tcaccagcagactttacgcagcttagctcttaaactgcagtcactgcagcactcccaacaaggtggacgccttagtggttcata

SEQ ID NO: 4540 - DNA, 84 bp, Artificial Sequence
  Synthetic
tcaccagcagactttacgcagcttagctcttaaaccgatccgagcagagcctccccaacaaggtggacgccttagtggttcata

SEQ ID NO: 4541 - DNA, 84 bp, Artificial Sequence
  Synthetic
tcaccagcagactttacgcagcttagctcttaaacctctactcgtcctggtccgccaacaaggtggacgccttagtggttcata

SEQ ID NO: 4542 - DNA, 84 bp, Artificial Sequence
  Synthetic
tcaccagcagactttacgcagcttagctcttaaactatagcgttcgcgcccggaccaacaaggtggacgccttagtggttcata

SEQ ID NO: 4543 - DNA, 84 bp, Artificial Sequence
  Synthetic
tcaccagcagactttacgcagcttagctcttaaacgcgtctcacccgatgcgcaccaacaaggtggacgccttagtggttcata

SEQ ID NO: 4544 - DNA, 84 bp, Artificial Sequence
  Synthetic
tcaccagcagactttacgcagcttagctcttaaaccctcctgaactcccattggccaacaaggtggacgccttagtggttcata

SEQ ID NO: 4545 - DNA, 84 bp, Artificial Sequence
  Synthetic
tcaccagcagactttacgcagcttagctcttaaaccttgggtgcgccttgaggcccaacaaggtggacgccttagtggttcata

SEQ ID NO: 4546 - DNA, 84 bp, Artificial Sequence
  Synthetic
tcaccagcagactttacgcagcttagctcttaaactggatgcaacacccgatccccaacaaggtggacgccttagtggttcata

SEQ ID NO: 4547 - DNA, 84 bp, Artificial Sequence
  Synthetic
tcaccagcagactttacgcagcttagctcttaaacatcctgggtgccggcctggccaacaaggtggacgccttagtggttcata

SEQ ID NO: 4548 - DNA, 84 bp, Artificial Sequence
  Synthetic
tcaccagcagactttacgcagcttagctcttaaacgaggtgccccgcctgcaacccaacaaggtggacgccttagtggttcata

SEQ ID NO: 4549 - DNA, 84 bp, Artificial Sequence
  Synthetic
tcaccagcagactttacgcagcttagctcttaaactggtcggaagtggccgtgaccaacaaggtggacgccttagtggttcata

SEQ ID NO: 4550 - DNA, 84 bp, Artificial Sequence
  Synthetic
tcaccagcagactttacgcagcttagctcttaaacccgccggggacgaccaaggccaacaaggtggacgccttagtggttcata

SEQ ID NO: 4551 - DNA, 84 bp, Artificial Sequence
  Synthetic
tcaccagcagactttacgcagcttagctcttaaacctgagagtctccacagtcgccaacaaggtggacgccttagtggttcata

SEQ ID NO: 4552 - DNA, 84 bp, Artificial Sequence
  Synthetic
tcaccagcagactttacgcagcttagctcttaaacgggacgaccaaggtctgcgccaacaaggtggacgccttagtggttcata

SEQ ID NO: 4553 - DNA, 84 bp, Artificial Sequence
  Synthetic
tcaccagcagactttacgcagcttagctcttaaacctcgagatttctgctccctccaacaaggtggacgccttagtggttcata

SEQ ID NO: 4554 - DNA, 84 bp, Artificial Sequence
  Synthetic
tcaccagcagactttacgcagcttagctcttaaacggtgagaacgtcctgcttcccaacaaggtggacgccttagtggttcata

SEQ ID NO: 4555 - DNA, 84 bp, Artificial Sequence
  Synthetic
tcaccagcagactttacgcagcttagctcttaaacgctcattccggaaccccacccaacaaggtggacgccttagtggttcata

SEQ ID NO: 4556 - DNA, 84 bp, Artificial Sequence
  Synthetic
tcaccagcagactttacgcagcttagctcttaaacccttcaagctgggagagggccaacaaggtggacgccttagtggttcata

SEQ ID NO: 4557 - DNA, 84 bp, Artificial Sequence
  Synthetic
tcaccagcagactttacgcagcttagctcttaaacccgatggggggcggggcgcccaacaaggtggacgccttagtggttcata

SEQ ID NO: 4558 - DNA, 84 bp, Artificial Sequence
  Synthetic
tcaccagcagactttacgcagcttagctcttaaacgtctccaagtcctggtaccccaacaaggtggacgccttagtggttcata

SEQ ID NO: 4559 - DNA, 84 bp, Artificial Sequence
  Synthetic
tcaccagcagactttacgcagcttagctcttaaaccttcaaacagcgtttcccgccaacaaggtggacgccttagtggttcata

SEQ ID NO: 4560 - DNA, 84 bp, Artificial Sequence
  Synthetic
tcaccagcagactttacgcagcttagctcttaaacctctactcacccgcttcaaccaacaaggtggacgccttagtggttcata

SEQ ID NO: 4561 - DNA, 84 bp, Artificial Sequence
  Synthetic
tcaccagcagactttacgcagcttagctcttaaacctgactcccgcgcgcgcaaccaacaaggtggacgccttagtggttcata

SEQ ID NO: 4562 - DNA, 84 bp, Artificial Sequence
  Synthetic
tcaccagcagactttacgcagcttagctcttaaacgagtagcgcggcctggctgccaacaaggtggacgccttagtggttcata

SEQ ID NO: 4563 - DNA, 84 bp, Artificial Sequence
  Synthetic
tcaccagcagactttacgcagcttagctcttaaactggaccccactcaccgcgcccaacaaggtggacgccttagtggttcata

SEQ ID NO: 4564 - DNA, 84 bp, Artificial Sequence
  Synthetic
tcaccagcagactttacgcagcttagctcttaaacccatcaagcacgttcgagcccaacaaggtggacgccttagtggttcata

SEQ ID NO: 4565 - DNA, 84 bp, Artificial Sequence
  Synthetic
tcaccagcagactttacgcagcttagctcttaaaccaccatggcggaccagcttccaacaaggtggacgccttagtggttcata

SEQ ID NO: 4566 - DNA, 84 bp, Artificial Sequence
  Synthetic
tcaccagcagactttacgcagcttagctcttaaactagtgcgtcgcctccgttgccaacaaggtggacgccttagtggttcata

SEQ ID NO: 4567 - DNA, 84 bp, Artificial Sequence
  Synthetic
tcaccagcagactttacgcagcttagctcttaaacgcgggaaacgtctttgctcccaacaaggtggacgccttagtggttcata

SEQ ID NO: 4568 - DNA, 84 bp, Artificial Sequence
  Synthetic
tcaccagcagactttacgcagcttagctcttaaacactggccggtctctcctctccaacaaggtggacgccttagtggttcata

SEQ ID NO: 4569 - DNA, 84 bp, Artificial Sequence
  Synthetic
tcaccagcagactttacgcagcttagctcttaaaccagagacctagctcgggtgccaacaaggtggacgccttagtggttcata

SEQ ID NO: 4570 - DNA, 84 bp, Artificial Sequence
  Synthetic
tcaccagcagactttacgcagcttagctcttaaacctctaggggcctcctctagccaacaaggtggacgccttagtggttcata

SEQ ID NO: 4571 - DNA, 84 bp, Artificial Sequence
  Synthetic
tcaccagcagactttacgcagcttagctcttaaacgggagatgtccgccatcttccaacaaggtggacgccttagtggttcata

SEQ ID NO: 4572 - DNA, 84 bp, Artificial Sequence
  Synthetic
tcaccagcagactttacgcagcttagctcttaaacccccgcgcttcctgatgagccaacaaggtggacgccttagtggttcata

SEQ ID NO: 4573 - DNA, 84 bp, Artificial Sequence
  Synthetic
tcaccagcagactttacgcagcttagctcttaaacgatgagttcgtccagggagccaacaaggtggacgccttagtggttcata

SEQ ID NO: 4574 - DNA, 84 bp, Artificial Sequence
  Synthetic
tcaccagcagactttacgcagcttagctcttaaacccgacggaggggctcggggccaacaaggtggacgccttagtggttcata

SEQ ID NO: 4575 - DNA, 84 bp, Artificial Sequence
  Synthetic
tcaccagcagactttacgcagcttagctcttaaacacggctccatgtctctgagccaacaaggtggacgccttagtggttcata

SEQ ID NO: 4576 - DNA, 84 bp, Artificial Sequence
  Synthetic
tcaccagcagactttacgcagcttagctcttaaacacccagactcgcgagagccccaacaaggtggacgccttagtggttcata

SEQ ID NO: 4577 - DNA, 84 bp, Artificial Sequence
  Synthetic
tcaccagcagactttacgcagcttagctcttaaacctccggcgccatatttgcgccaacaaggtggacgccttagtggttcata

SEQ ID NO: 4578 - DNA, 84 bp, Artificial Sequence
  Synthetic
tcaccagcagactttacgcagcttagctcttaaactctcgcccttcaagctgccccaacaaggtggacgccttagtggttcata

SEQ ID NO: 4579 - DNA, 84 bp, Artificial Sequence
  Synthetic
tcaccagcagactttacgcagcttagctcttaaacttcaagctgcccgagcccaccaacaaggtggacgccttagtggttcata

SEQ ID NO: 4580 - DNA, 84 bp, Artificial Sequence
  Synthetic
tcaccagcagactttacgcagcttagctcttaaaccttcgcctccgcttcagggccaacaaggtggacgccttagtggttcata

SEQ ID NO: 4581 - DNA, 84 bp, Artificial Sequence
  Synthetic
tcaccagcagactttacgcagcttagctcttaaacgacttcccgcgtcgctacgccaacaaggtggacgccttagtggttcata

SEQ ID NO: 4582 - DNA, 84 bp, Artificial Sequence
  Synthetic
tcaccagcagactttacgcagcttagctcttaaactcctgcccgttcgtccgccccaacaaggtggacgccttagtggttcata

SEQ ID NO: 4583 - DNA, 84 bp, Artificial Sequence
  Synthetic
tcaccagcagactttacgcagcttagctcttaaaccaccctgtgtaggcgcgcgccaacaaggtggacgccttagtggttcata

SEQ ID NO: 4584 - DNA, 84 bp, Artificial Sequence
  Synthetic
tcaccagcagactttacgcagcttagctcttaaacctacgcggcagtgcgctgcccaacaaggtggacgccttagtggttcata

SEQ ID NO: 4585 - DNA, 84 bp, Artificial Sequence
  Synthetic
tcaccagcagactttacgcagcttagctcttaaacctcggggcgtcccgcttccccaacaaggtggacgccttagtggttcata

SEQ ID NO: 4586 - DNA, 84 bp, Artificial Sequence
  Synthetic
tcaccagcagactttacgcagcttagctcttaaacctccagtcagggagcgaggccaacaaggtggacgccttagtggttcata

SEQ ID NO: 4587 - DNA, 84 bp, Artificial Sequence
  Synthetic
tcaccagcagactttacgcagcttagctcttaaaccaacttcccgtctgcacccccaacaaggtggacgccttagtggttcata

SEQ ID NO: 4588 - DNA, 84 bp, Artificial Sequence
  Synthetic
tcaccagcagactttacgcagcttagctcttaaacggtggaggccacacgctacccaacaaggtggacgccttagtggttcata

SEQ ID NO: 4589 - DNA, 84 bp, Artificial Sequence
  Synthetic
tcaccagcagactttacgcagcttagctcttaaacccactaccgttaacagaatccaacaaggtggacgccttagtggttcata

SEQ ID NO: 4590 - DNA, 84 bp, Artificial Sequence
  Synthetic
tcaccagcagactttacgcagcttagctcttaaacttaacagaatccggagaggccaacaaggtggacgccttagtggttcata

SEQ ID NO: 4591 - DNA, 84 bp, Artificial Sequence
  Synthetic
tcaccagcagactttacgcagcttagctcttaaacctaccgttaacagaatccgccaacaaggtggacgccttagtggttcata

SEQ ID NO: 4592 - DNA, 84 bp, Artificial Sequence
  Synthetic
tcaccagcagactttacgcagcttagctcttaaacctctcgtctgatccctgctccaacaaggtggacgccttagtggttcata

SEQ ID NO: 4593 - DNA, 84 bp, Artificial Sequence
  Synthetic
tcaccagcagactttacgcagcttagctcttaaaccagtctggcggctgcattgccaacaaggtggacgccttagtggttcata

SEQ ID NO: 4594 - DNA, 84 bp, Artificial Sequence
  Synthetic
tcaccagcagactttacgcagcttagctcttaaacagcaatgcagccgccagacccaacaaggtggacgccttagtggttcata

SEQ ID NO: 4595 - DNA, 84 bp, Artificial Sequence
  Synthetic
tcaccagcagactttacgcagcttagctcttaaacccggctccacccccagcttccaacaaggtggacgccttagtggttcata

SEQ ID NO: 4596 - DNA, 84 bp, Artificial Sequence
  Synthetic
tcaccagcagactttacgcagcttagctcttaaacctagaggtacccgccgcgtccaacaaggtggacgccttagtggttcata

SEQ ID NO: 4597 - DNA, 84 bp, Artificial Sequence
  Synthetic
tcaccagcagactttacgcagcttagctcttaaacccacgtccgccagttccatccaacaaggtggacgccttagtggttcata

SEQ ID NO: 4598 - DNA, 84 bp, Artificial Sequence
  Synthetic
tcaccagcagactttacgcagcttagctcttaaacttacctcaggatcgcgactccaacaaggtggacgccttagtggttcata

SEQ ID NO: 4599 - DNA, 84 bp, Artificial Sequence
  Synthetic
tcaccagcagactttacgcagcttagctcttaaaccttggggccttgtcagtcgccaacaaggtggacgccttagtggttcata

SEQ ID NO: 4600 - DNA, 84 bp, Artificial Sequence
  Synthetic
tcaccagcagactttacgcagcttagctcttaaacgcgcggggatcgcttgtccccaacaaggtggacgccttagtggttcata

SEQ ID NO: 4601 - DNA, 84 bp, Artificial Sequence
  Synthetic
tcaccagcagactttacgcagcttagctcttaaacacccccgggtgactagcttccaacaaggtggacgccttagtggttcata

SEQ ID NO: 4602 - DNA, 84 bp, Artificial Sequence
  Synthetic
tcaccagcagactttacgcagcttagctcttaaacaccccggccccaagagtctccaacaaggtggacgccttagtggttcata

SEQ ID NO: 4603 - DNA, 84 bp, Artificial Sequence
  Synthetic
tcaccagcagactttacgcagcttagctcttaaacccgggtgactagcttggccccaacaaggtggacgccttagtggttcata

SEQ ID NO: 4604 - DNA, 84 bp, Artificial Sequence
  Synthetic
tcaccagcagactttacgcagcttagctcttaaactctcgctcggagtttccctccaacaaggtggacgccttagtggttcata

SEQ ID NO: 4605 - DNA, 84 bp, Artificial Sequence
  Synthetic
tcaccagcagactttacgcagcttagctcttaaacctgcgttcgctccgcgctgccaacaaggtggacgccttagtggttcata

SEQ ID NO: 4606 - DNA, 84 bp, Artificial Sequence
  Synthetic
tcaccagcagactttacgcagcttagctcttaaacccgtttggggagcattgggccaacaaggtggacgccttagtggttcata

SEQ ID NO: 4607 - DNA, 84 bp, Artificial Sequence
  Synthetic
tcaccagcagactttacgcagcttagctcttaaaccgcctcctgaccctccttgccaacaaggtggacgccttagtggttcata

SEQ ID NO: 4608 - DNA, 84 bp, Artificial Sequence
  Synthetic
tcaccagcagactttacgcagcttagctcttaaacagagtgatgtgccgcctgcccaacaaggtggacgccttagtggttcata

SEQ ID NO: 4609 - DNA, 84 bp, Artificial Sequence
  Synthetic
tcaccagcagactttacgcagcttagctcttaaaccaagagccaccgctggccaccaacaaggtggacgccttagtggttcata

SEQ ID NO: 4610 - DNA, 84 bp, Artificial Sequence
  Synthetic
tcaccagcagactttacgcagcttagctcttaaactgaggcagtgcgaggcgcgccaacaaggtggacgccttagtggttcata

SEQ ID NO: 4611 - DNA, 84 bp, Artificial Sequence
  Synthetic
tcaccagcagactttacgcagcttagctcttaaacgaggtgactgacgcgggccccaacaaggtggacgccttagtggttcata

SEQ ID NO: 4612 - DNA, 84 bp, Artificial Sequence
  Synthetic
tcaccagcagactttacgcagcttagctcttaaaccttgcttctcgcaggagccccaacaaggtggacgccttagtggttcata

SEQ ID NO: 4613 - DNA, 84 bp, Artificial Sequence
  Synthetic
tcaccagcagactttacgcagcttagctcttaaacccctctcgggagaaccctgccaacaaggtggacgccttagtggttcata

SEQ ID NO: 4614 - DNA, 84 bp, Artificial Sequence
  Synthetic
tcaccagcagactttacgcagcttagctcttaaactctcgggagaaccctggccccaacaaggtggacgccttagtggttcata

SEQ ID NO: 4615 - DNA, 84 bp, Artificial Sequence
  Synthetic
tcaccagcagactttacgcagcttagctcttaaacagagggaggacgctgggacccaacaaggtggacgccttagtggttcata

SEQ ID NO: 4616 - DNA, 84 bp, Artificial Sequence
  Synthetic
tcaccagcagactttacgcagcttagctcttaaaccccagccttccgcgcttgcccaacaaggtggacgccttagtggttcata

SEQ ID NO: 4617 - DNA, 84 bp, Artificial Sequence
  Synthetic
tcaccagcagactttacgcagcttagctcttaaacgggccgctattggaagaacccaacaaggtggacgccttagtggttcata

SEQ ID NO: 4618 - DNA, 84 bp, Artificial Sequence
  Synthetic
tcaccagcagactttacgcagcttagctcttaaacctattggaagaaccgtgaaccaacaaggtggacgccttagtggttcata

SEQ ID NO: 4619 - DNA, 84 bp, Artificial Sequence
  Synthetic
tcaccagcagactttacgcagcttagctcttaaacctcaggcggcggccatgttccaacaaggtggacgccttagtggttcata

SEQ ID NO: 4620 - DNA, 84 bp, Artificial Sequence
  Synthetic
tcaccagcagactttacgcagcttagctcttaaacgctctcctctcaggcggcgccaacaaggtggacgccttagtggttcata

SEQ ID NO: 4621 - DNA, 84 bp, Artificial Sequence
  Synthetic
tcaccagcagactttacgcagcttagctcttaaactctctgcagcccgcgggtaccaacaaggtggacgccttagtggttcata

SEQ ID NO: 4622 - DNA, 84 bp, Artificial Sequence
  Synthetic
tcaccagcagactttacgcagcttagctcttaaacgggagccggtggacgcgcgccaacaaggtggacgccttagtggttcata

SEQ ID NO: 4623 - DNA, 84 bp, Artificial Sequence
  Synthetic
tcaccagcagactttacgcagcttagctcttaaacctgttctccgggcggcggcccaacaaggtggacgccttagtggttcata

SEQ ID NO: 4624 - DNA, 84 bp, Artificial Sequence
  Synthetic
tcaccagcagactttacgcagcttagctcttaaacgggctacatggagcggcgcccaacaaggtggacgccttagtggttcata

SEQ ID NO: 4625 - DNA, 84 bp, Artificial Sequence
  Synthetic
tcaccagcagactttacgcagcttagctcttaaacgtgtgcgttgctccctgctccaacaaggtggacgccttagtggttcata

SEQ ID NO: 4626 - DNA, 84 bp, Artificial Sequence
  Synthetic
tcaccagcagactttacgcagcttagctcttaaacccatgccgccgagtcccgcccaacaaggtggacgccttagtggttcata

SEQ ID NO: 4627 - DNA, 84 bp, Artificial Sequence
  Synthetic
tcaccagcagactttacgcagcttagctcttaaacctgcggtgctgccctggccccaacaaggtggacgccttagtggttcata

SEQ ID NO: 4628 - DNA, 84 bp, Artificial Sequence
  Synthetic
tcaccagcagactttacgcagcttagctcttaaacacgtgaagcgctacgctagccaacaaggtggacgccttagtggttcata

SEQ ID NO: 4629 - DNA, 84 bp, Artificial Sequence
  Synthetic
tcaccagcagactttacgcagcttagctcttaaactcaccgtgctccgaggcgcccaacaaggtggacgccttagtggttcata

SEQ ID NO: 4630 - DNA, 84 bp, Artificial Sequence
  Synthetic
tcaccagcagactttacgcagcttagctcttaaaccggagcagtcccggcagcaccaacaaggtggacgccttagtggttcata

SEQ ID NO: 4631 - DNA, 84 bp, Artificial Sequence
  Synthetic
tcaccagcagactttacgcagcttagctcttaaaccctctctccgcctagtgccccaacaaggtggacgccttagtggttcata

SEQ ID NO: 4632 - DNA, 84 bp, Artificial Sequence
  Synthetic
tcaccagcagactttacgcagcttagctcttaaacttcctcctcgcggcttaccccaacaaggtggacgccttagtggttcata

SEQ ID NO: 4633 - DNA, 84 bp, Artificial Sequence
  Synthetic
tcaccagcagactttacgcagcttagctcttaaacctgtggaccgatcctgctaccaacaaggtggacgccttagtggttcata

SEQ ID NO: 4634 - DNA, 84 bp, Artificial Sequence
  Synthetic
tcaccagcagactttacgcagcttagctcttaaacagccgttgagacgcctctgccaacaaggtggacgccttagtggttcata

SEQ ID NO: 4635 - DNA, 84 bp, Artificial Sequence
  Synthetic
tcaccagcagactttacgcagcttagctcttaaactagctgcgctgctcccgcgccaacaaggtggacgccttagtggttcata

SEQ ID NO: 4636 - DNA, 84 bp, Artificial Sequence
  Synthetic
tcaccagcagactttacgcagcttagctcttaaacttgagacgcctctgcggcaccaacaaggtggacgccttagtggttcata

SEQ ID NO: 4637 - DNA, 84 bp, Artificial Sequence
  Synthetic
tcaccagcagactttacgcagcttagctcttaaacttgttgcaaggggcgaggtccaacaaggtggacgccttagtggttcata

SEQ ID NO: 4638 - DNA, 84 bp, Artificial Sequence
  Synthetic
tcaccagcagactttacgcagcttagctcttaaacccttctggacggatgactcccaacaaggtggacgccttagtggttcata

SEQ ID NO: 4639 - DNA, 84 bp, Artificial Sequence
  Synthetic
tcaccagcagactttacgcagcttagctcttaaacggactcagcggtagcaaccccaacaaggtggacgccttagtggttcata

SEQ ID NO: 4640 - DNA, 84 bp, Artificial Sequence
  Synthetic
tcaccagcagactttacgcagcttagctcttaaacctcttcagaccggccctccccaacaaggtggacgccttagtggttcata

SEQ ID NO: 4641 - DNA, 84 bp, Artificial Sequence
  Synthetic
tcaccagcagactttacgcagcttagctcttaaaccggttcctcggagccgcctccaacaaggtggacgccttagtggttcata

SEQ ID NO: 4642 - DNA, 84 bp, Artificial Sequence
  Synthetic
tcaccagcagactttacgcagcttagctcttaaactgaagaggagcgaggcggcccaacaaggtggacgccttagtggttcata

SEQ ID NO: 4643 - DNA, 84 bp, Artificial Sequence
  Synthetic
tcaccagcagactttacgcagcttagctcttaaactggtcgcctccgctcttcgccaacaaggtggacgccttagtggttcata

SEQ ID NO: 4644 - DNA, 84 bp, Artificial Sequence
  Synthetic
tcaccagcagactttacgcagcttagctcttaaactttcacctagggtagtcccccaacaaggtggacgccttagtggttcata

SEQ ID NO: 4645 - DNA, 84 bp, Artificial Sequence
  Synthetic
tcaccagcagactttacgcagcttagctcttaaacctcggaggtacggcctcccccaacaaggtggacgccttagtggttcata

SEQ ID NO: 4646 - DNA, 84 bp, Artificial Sequence
  Synthetic
tcaccagcagactttacgcagcttagctcttaaaccccactagcctccggcgctccaacaaggtggacgccttagtggttcata

SEQ ID NO: 4647 - DNA, 84 bp, Artificial Sequence
  Synthetic
tcaccagcagactttacgcagcttagctcttaaacccagcatcctcgggagcgaccaacaaggtggacgccttagtggttcata

SEQ ID NO: 4648 - DNA, 84 bp, Artificial Sequence
  Synthetic
tcaccagcagactttacgcagcttagctcttaaacactagcctccggcgctccaccaacaaggtggacgccttagtggttcata

SEQ ID NO: 4649 - DNA, 84 bp, Artificial Sequence
  Synthetic
tcaccagcagactttacgcagcttagctcttaaacccacagccggcgcctccttccaacaaggtggacgccttagtggttcata

SEQ ID NO: 4650 - DNA, 84 bp, Artificial Sequence
  Synthetic
tcaccagcagactttacgcagcttagctcttaaactcggggagccggactcctgccaacaaggtggacgccttagtggttcata

SEQ ID NO: 4651 - DNA, 84 bp, Artificial Sequence
  Synthetic
tcaccagcagactttacgcagcttagctcttaaacaaatcctcggttcaaatcgccaacaaggtggacgccttagtggttcata

SEQ ID NO: 4652 - DNA, 84 bp, Artificial Sequence
  Synthetic
tcaccagcagactttacgcagcttagctcttaaacccatcttagcgcccaggcgccaacaaggtggacgccttagtggttcata

SEQ ID NO: 4653 - DNA, 84 bp, Artificial Sequence
  Synthetic
tcaccagcagactttacgcagcttagctcttaaacaccacttccggggcaggcaccaacaaggtggacgccttagtggttcata

SEQ ID NO: 4654 - DNA, 84 bp, Artificial Sequence
  Synthetic
tcaccagcagactttacgcagcttagctcttaaaccgtcgctcgggccccgccaccaacaaggtggacgccttagtggttcata

SEQ ID NO: 4655 - DNA, 84 bp, Artificial Sequence
  Synthetic
tcaccagcagactttacgcagcttagctcttaaactcctgtggtgagctagcggccaacaaggtggacgccttagtggttcata

SEQ ID NO: 4656 - DNA, 84 bp, Artificial Sequence
  Synthetic
tcaccagcagactttacgcagcttagctcttaaacgtggtgagctagcggattcccaacaaggtggacgccttagtggttcata

SEQ ID NO: 4657 - DNA, 84 bp, Artificial Sequence
  Synthetic
tcaccagcagactttacgcagcttagctcttaaaccctcgcgccttctgcagacccaacaaggtggacgccttagtggttcata

SEQ ID NO: 4658 - DNA, 84 bp, Artificial Sequence
  Synthetic
tcaccagcagactttacgcagcttagctcttaaactagccacaatgcgaccccgccaacaaggtggacgccttagtggttcata

SEQ ID NO: 4659 - DNA, 84 bp, Artificial Sequence
  Synthetic
tcaccagcagactttacgcagcttagctcttaaaccaatgcgaccccgcaaccgccaacaaggtggacgccttagtggttcata

SEQ ID NO: 4660 - DNA, 84 bp, Artificial Sequence
  Synthetic
tcaccagcagactttacgcagcttagctcttaaacacgtgatccgcagggcggcccaacaaggtggacgccttagtggttcata

SEQ ID NO: 4661 - DNA, 84 bp, Artificial Sequence
  Synthetic
tcaccagcagactttacgcagcttagctcttaaactaaggagagtgcggcgcttccaacaaggtggacgccttagtggttcata

SEQ ID NO: 4662 - DNA, 84 bp, Artificial Sequence
  Synthetic
tcaccagcagactttacgcagcttagctcttaaaccactctccttagggctcggccaacaaggtggacgccttagtggttcata

SEQ ID NO: 4663 - DNA, 84 bp, Artificial Sequence
  Synthetic
tcaccagcagactttacgcagcttagctcttaaactagggctcggtctctggccccaacaaggtggacgccttagtggttcata

SEQ ID NO: 4664 - DNA, 84 bp, Artificial Sequence
  Synthetic
tcaccagcagactttacgcagcttagctcttaaactggtgcggcctgtgaggtgccaacaaggtggacgccttagtggttcata

SEQ ID NO: 4665 - DNA, 84 bp, Artificial Sequence
  Synthetic
tcaccagcagactttacgcagcttagctcttaaaccccgttgctcagaagtatcccaacaaggtggacgccttagtggttcata

SEQ ID NO: 4666 - DNA, 84 bp, Artificial Sequence
  Synthetic
tcaccagcagactttacgcagcttagctcttaaacgacttcggagccctccgccccaacaaggtggacgccttagtggttcata

SEQ ID NO: 4667 - DNA, 84 bp, Artificial Sequence
  Synthetic
tcaccagcagactttacgcagcttagctcttaaacttgtggggaagtggggttcccaacaaggtggacgccttagtggttcata

SEQ ID NO: 4668 - DNA, 84 bp, Artificial Sequence
  Synthetic
tcaccagcagactttacgcagcttagctcttaaacactttcaagtttccccaccccaacaaggtggacgccttagtggttcata

SEQ ID NO: 4669 - DNA, 84 bp, Artificial Sequence
  Synthetic
tcaccagcagactttacgcagcttagctcttaaacccaatatcgaaacccacgaccaacaaggtggacgccttagtggttcata

SEQ ID NO: 4670 - DNA, 84 bp, Artificial Sequence
  Synthetic
tcaccagcagactttacgcagcttagctcttaaacctaggagttcctcagcagtccaacaaggtggacgccttagtggttcata

SEQ ID NO: 4671 - DNA, 84 bp, Artificial Sequence
  Synthetic
tcaccagcagactttacgcagcttagctcttaaacgggttagcaggtgagcctgccaacaaggtggacgccttagtggttcata

SEQ ID NO: 4672 - DNA, 84 bp, Artificial Sequence
  Synthetic
tcaccagcagactttacgcagcttagctcttaaaccagtcttcgttctctcgccccaacaaggtggacgccttagtggttcata

SEQ ID NO: 4673 - DNA, 84 bp, Artificial Sequence
  Synthetic
tcaccagcagactttacgcagcttagctcttaaacccgggattcccgcgcccagccaacaaggtggacgccttagtggttcata

SEQ ID NO: 4674 - DNA, 84 bp, Artificial Sequence
  Synthetic
tcaccagcagactttacgcagcttagctcttaaacttggtgccgcctcctcctcccaacaaggtggacgccttagtggttcata

SEQ ID NO: 4675 - DNA, 84 bp, Artificial Sequence
  Synthetic
tcaccagcagactttacgcagcttagctcttaaactacccttggtgccgcctccccaacaaggtggacgccttagtggttcata

SEQ ID NO: 4676 - DNA, 84 bp, Artificial Sequence
  Synthetic
tcaccagcagactttacgcagcttagctcttaaacagatcgagctccctgtgtgccaacaaggtggacgccttagtggttcata

SEQ ID NO: 4677 - DNA, 84 bp, Artificial Sequence
  Synthetic
tcaccagcagactttacgcagcttagctcttaaactgtgtgcaccgcgcgctgcccaacaaggtggacgccttagtggttcata

SEQ ID NO: 4678 - DNA, 84 bp, Artificial Sequence
  Synthetic
tcaccagcagactttacgcagcttagctcttaaacccacttacgcgcctcgggcccaacaaggtggacgccttagtggttcata

SEQ ID NO: 4679 - DNA, 84 bp, Artificial Sequence
  Synthetic
tcaccagcagactttacgcagcttagctcttaaactcagcctcccgggagcgtgccaacaaggtggacgccttagtggttcata

SEQ ID NO: 4680 - DNA, 84 bp, Artificial Sequence
  Synthetic
tcaccagcagactttacgcagcttagctcttaaaccccgggagcgtgacgcggcccaacaaggtggacgccttagtggttcata

SEQ ID NO: 4681 - DNA, 84 bp, Artificial Sequence
  Synthetic
tcaccagcagactttacgcagcttagctcttaaaccgtcacgctcccgggaggcccaacaaggtggacgccttagtggttcata

SEQ ID NO: 4682 - DNA, 84 bp, Artificial Sequence
  Synthetic
tcaccagcagactttacgcagcttagctcttaaacgctatcccctcgccgccggccaacaaggtggacgccttagtggttcata

SEQ ID NO: 4683 - DNA, 84 bp, Artificial Sequence
  Synthetic
tcaccagcagactttacgcagcttagctcttaaacccggagaagctcaaggatcccaacaaggtggacgccttagtggttcata

SEQ ID NO: 4684 - DNA, 84 bp, Artificial Sequence
  Synthetic
tcaccagcagactttacgcagcttagctcttaaactctggtaaccagctatcccccaacaaggtggacgccttagtggttcata

SEQ ID NO: 4685 - DNA, 84 bp, Artificial Sequence
  Synthetic
tcaccagcagactttacgcagcttagctcttaaactcctgttcccaaagcgcgcccaacaaggtggacgccttagtggttcata

SEQ ID NO: 4686 - DNA, 84 bp, Artificial Sequence
  Synthetic
tcaccagcagactttacgcagcttagctcttaaacggtcaatcgaacctcccgcccaacaaggtggacgccttagtggttcata

SEQ ID NO: 4687 - DNA, 84 bp, Artificial Sequence
  Synthetic
tcaccagcagactttacgcagcttagctcttaaacgttcccaaagcgcgcgttaccaacaaggtggacgccttagtggttcata

SEQ ID NO: 4688 - DNA, 84 bp, Artificial Sequence
  Synthetic
tcaccagcagactttacgcagcttagctcttaaaccaatcttactcctcctgttccaacaaggtggacgccttagtggttcata

SEQ ID NO: 4689 - DNA, 84 bp, Artificial Sequence
  Synthetic
tcaccagcagactttacgcagcttagctcttaaacttggaacaggaggagtaagccaacaaggtggacgccttagtggttcata

SEQ ID NO: 4690 - DNA, 84 bp, Artificial Sequence
  Synthetic
tcaccagcagactttacgcagcttagctcttaaacgttccaagggacagcactcccaacaaggtggacgccttagtggttcata

SEQ ID NO: 4691 - DNA, 84 bp, Artificial Sequence
  Synthetic
tcaccagcagactttacgcagcttagctcttaaaccagtgctcggcaaggccgtccaacaaggtggacgccttagtggttcata

SEQ ID NO: 4692 - DNA, 84 bp, Artificial Sequence
  Synthetic
tcaccagcagactttacgcagcttagctcttaaacaacccccttccgctcttctccaacaaggtggacgccttagtggttcata

SEQ ID NO: 4693 - DNA, 84 bp, Artificial Sequence
  Synthetic
tcaccagcagactttacgcagcttagctcttaaacccgggtccggggtcccttcccaacaaggtggacgccttagtggttcata

SEQ ID NO: 4694 - DNA, 84 bp, Artificial Sequence
  Synthetic
tcaccagcagactttacgcagcttagctcttaaactccttgtcggccatggcggccaacaaggtggacgccttagtggttcata

SEQ ID NO: 4695 - DNA, 84 bp, Artificial Sequence
  Synthetic
tcaccagcagactttacgcagcttagctcttaaacctattgtttcctgcgccccccaacaaggtggacgccttagtggttcata

SEQ ID NO: 4696 - DNA, 84 bp, Artificial Sequence
  Synthetic
tcaccagcagactttacgcagcttagctcttaaactcagtaccggggactgcacccaacaaggtggacgccttagtggttcata

SEQ ID NO: 4697 - DNA, 84 bp, Artificial Sequence
  Synthetic
tcaccagcagactttacgcagcttagctcttaaacttcccaagcgcgtcacactccaacaaggtggacgccttagtggttcata

SEQ ID NO: 4698 - DNA, 84 bp, Artificial Sequence
  Synthetic
tcaccagcagactttacgcagcttagctcttaaaccctcggactcctctcgttaccaacaaggtggacgccttagtggttcata

SEQ ID NO: 4699 - DNA, 84 bp, Artificial Sequence
  Synthetic
tcaccagcagactttacgcagcttagctcttaaaccagacctcggtacccgcgaccaacaaggtggacgccttagtggttcata

SEQ ID NO: 4700 - DNA, 84 bp, Artificial Sequence
  Synthetic
tcaccagcagactttacgcagcttagctcttaaacccgagattgcctcgggattccaacaaggtggacgccttagtggttcata

SEQ ID NO: 4701 - DNA, 84 bp, Artificial Sequence
  Synthetic
tcaccagcagactttacgcagcttagctcttaaacgttccgcgtgcgggtctggccaacaaggtggacgccttagtggttcata

SEQ ID NO: 4702 - DNA, 84 bp, Artificial Sequence
  Synthetic
tcaccagcagactttacgcagcttagctcttaaaccctccgagattgcctcgggccaacaaggtggacgccttagtggttcata

SEQ ID NO: 4703 - DNA, 84 bp, Artificial Sequence
  Synthetic
tcaccagcagactttacgcagcttagctcttaaacttgttcgccctcgttgcgcccaacaaggtggacgccttagtggttcata

SEQ ID NO: 4704 - DNA, 84 bp, Artificial Sequence
  Synthetic
tcaccagcagactttacgcagcttagctcttaaactcgttgcgcagtagtgctaccaacaaggtggacgccttagtggttcata

SEQ ID NO: 4705 - DNA, 84 bp, Artificial Sequence
  Synthetic
tcaccagcagactttacgcagcttagctcttaaacccatctccagggagatataccaacaaggtggacgccttagtggttcata

SEQ ID NO: 4706 - DNA, 84 bp, Artificial Sequence
  Synthetic
tcaccagcagactttacgcagcttagctcttaaaccacctgcgcggctaaccctccaacaaggtggacgccttagtggttcata

SEQ ID NO: 4707 - DNA, 84 bp, Artificial Sequence
  Synthetic
tcaccagcagactttacgcagcttagctcttaaacacccgctgactgggagttcccaacaaggtggacgccttagtggttcata

SEQ ID NO: 4708 - DNA, 84 bp, Artificial Sequence
  Synthetic
tcaccagcagactttacgcagcttagctcttaaaccagcattgcgcctgcgcaaccaacaaggtggacgccttagtggttcata

SEQ ID NO: 4709 - DNA, 84 bp, Artificial Sequence
  Synthetic
tcaccagcagactttacgcagcttagctcttaaaccctactgcaggactagatcccaacaaggtggacgccttagtggttcata

SEQ ID NO: 4710 - DNA, 84 bp, Artificial Sequence
  Synthetic
tcaccagcagactttacgcagcttagctcttaaaccggtgtggccccgggccgcccaacaaggtggacgccttagtggttcata

SEQ ID NO: 4711 - DNA, 84 bp, Artificial Sequence
  Synthetic
tcaccagcagactttacgcagcttagctcttaaaccccaagccagtgcaaggccccaacaaggtggacgccttagtggttcata

SEQ ID NO: 4712 - DNA, 84 bp, Artificial Sequence
  Synthetic
tcaccagcagactttacgcagcttagctcttaaacgtgtccgactctccgatctccaacaaggtggacgccttagtggttcata

SEQ ID NO: 4713 - DNA, 84 bp, Artificial Sequence
  Synthetic
tcaccagcagactttacgcagcttagctcttaaacgagagttagaccgggcttcccaacaaggtggacgccttagtggttcata

SEQ ID NO: 4714 - DNA, 84 bp, Artificial Sequence
  Synthetic
tcaccagcagactttacgcagcttagctcttaaacactctcggatctccgacacccaacaaggtggacgccttagtggttcata

SEQ ID NO: 4715 - DNA, 84 bp, Artificial Sequence
  Synthetic
tcaccagcagactttacgcagcttagctcttaaactggagcggctgcgggacgtccaacaaggtggacgccttagtggttcata

SEQ ID NO: 4716 - DNA, 84 bp, Artificial Sequence
  Synthetic
tcaccagcagactttacgcagcttagctcttaaaccgggtctcctccggcgccgccaacaaggtggacgccttagtggttcata

SEQ ID NO: 4717 - DNA, 84 bp, Artificial Sequence
  Synthetic
tcaccagcagactttacgcagcttagctcttaaacacccggtgtcttctcgcccccaacaaggtggacgccttagtggttcata

SEQ ID NO: 4718 - DNA, 84 bp, Artificial Sequence
  Synthetic
tcaccagcagactttacgcagcttagctcttaaaccaactcagagaagccaaagccaacaaggtggacgccttagtggttcata

SEQ ID NO: 4719 - DNA, 84 bp, Artificial Sequence
  Synthetic
tcaccagcagactttacgcagcttagctcttaaacctatacacaaccccaactcccaacaaggtggacgccttagtggttcata

SEQ ID NO: 4720 - DNA, 84 bp, Artificial Sequence
  Synthetic
tcaccagcagactttacgcagcttagctcttaaacaaagctgaattcccagcgcccaacaaggtggacgccttagtggttcata

SEQ ID NO: 4721 - DNA, 84 bp, Artificial Sequence
  Synthetic
tcaccagcagactttacgcagcttagctcttaaacccctggtccctggcgagggccaacaaggtggacgccttagtggttcata

SEQ ID NO: 4722 - DNA, 84 bp, Artificial Sequence
  Synthetic
tcaccagcagactttacgcagcttagctcttaaaccggtggctctccgcccctcccaacaaggtggacgccttagtggttcata

SEQ ID NO: 4723 - DNA, 84 bp, Artificial Sequence
  Synthetic
tcaccagcagactttacgcagcttagctcttaaacccacgctcgcggcaaccaaccaacaaggtggacgccttagtggttcata

SEQ ID NO: 4724 - DNA, 84 bp, Artificial Sequence
  Synthetic
tcaccagcagactttacgcagcttagctcttaaacgtgtgattcccggcggtggccaacaaggtggacgccttagtggttcata

SEQ ID NO: 4725 - DNA, 84 bp, Artificial Sequence
  Synthetic
tcaccagcagactttacgcagcttagctcttaaacacgaaagctcgagggcttcccaacaaggtggacgccttagtggttcata

SEQ ID NO: 4726 - DNA, 84 bp, Artificial Sequence
  Synthetic
tcaccagcagactttacgcagcttagctcttaaacccgggaatcacacgggctcccaacaaggtggacgccttagtggttcata

SEQ ID NO: 4727 - DNA, 84 bp, Artificial Sequence
  Synthetic
tcaccagcagactttacgcagcttagctcttaaacacaacttctcccgcgaagtccaacaaggtggacgccttagtggttcata

SEQ ID NO: 4728 - DNA, 84 bp, Artificial Sequence
  Synthetic
tcaccagcagactttacgcagcttagctcttaaacgagcctcgataacagattcccaacaaggtggacgccttagtggttcata

SEQ ID NO: 4729 - DNA, 84 bp, Artificial Sequence
  Synthetic
tcaccagcagactttacgcagcttagctcttaaacctgtcttcgccttcttgcaccaacaaggtggacgccttagtggttcata

SEQ ID NO: 4730 - DNA, 84 bp, Artificial Sequence
  Synthetic
tcaccagcagactttacgcagcttagctcttaaacccattctcgcgcctcctctccaacaaggtggacgccttagtggttcata

SEQ ID NO: 4731 - DNA, 84 bp, Artificial Sequence
  Synthetic
tcaccagcagactttacgcagcttagctcttaaacttctcgcgcctcctcttccccaacaaggtggacgccttagtggttcata

SEQ ID NO: 4732 - DNA, 84 bp, Artificial Sequence
  Synthetic
tcaccagcagactttacgcagcttagctcttaaaccctccattctcgcgcctccccaacaaggtggacgccttagtggttcata

SEQ ID NO: 4733 - DNA, 84 bp, Artificial Sequence
  Synthetic
tcaccagcagactttacgcagcttagctcttaaacctgggtggacaagtatcggccaacaaggtggacgccttagtggttcata

SEQ ID NO: 4734 - DNA, 84 bp, Artificial Sequence
  Synthetic
tcaccagcagactttacgcagcttagctcttaaactgtgatagtccagccgtccccaacaaggtggacgccttagtggttcata

SEQ ID NO: 4735 - DNA, 84 bp, Artificial Sequence
  Synthetic
tcaccagcagactttacgcagcttagctcttaaactgagcctctgggtggacaaccaacaaggtggacgccttagtggttcata

SEQ ID NO: 4736 - DNA, 84 bp, Artificial Sequence
  Synthetic
tcaccagcagactttacgcagcttagctcttaaacttgatgccccttgtgaggtccaacaaggtggacgccttagtggttcata

SEQ ID NO: 4737 - DNA, 84 bp, Artificial Sequence
  Synthetic
tcaccagcagactttacgcagcttagctcttaaacacagtcgcctcagttcccgccaacaaggtggacgccttagtggttcata

SEQ ID NO: 4738 - DNA, 84 bp, Artificial Sequence
  Synthetic
tcaccagcagactttacgcagcttagctcttaaaccagttcccgccacggaacgccaacaaggtggacgccttagtggttcata

SEQ ID NO: 4739 - DNA, 84 bp, Artificial Sequence
  Synthetic
tcaccagcagactttacgcagcttagctcttaaaccgacctgaccctgagacccccaacaaggtggacgccttagtggttcata

SEQ ID NO: 4740 - DNA, 84 bp, Artificial Sequence
  Synthetic
tcaccagcagactttacgcagcttagctcttaaacaagcgcctgcacagtgaccccaacaaggtggacgccttagtggttcata

SEQ ID NO: 4741 - DNA, 84 bp, Artificial Sequence
  Synthetic
tcaccagcagactttacgcagcttagctcttaaacctgagatcgtcgcgtcaccccaacaaggtggacgccttagtggttcata

SEQ ID NO: 4742 - DNA, 84 bp, Artificial Sequence
  Synthetic
tcaccagcagactttacgcagcttagctcttaaacaatgcacctacgccaactgccaacaaggtggacgccttagtggttcata

SEQ ID NO: 4743 - DNA, 84 bp, Artificial Sequence
  Synthetic
tcaccagcagactttacgcagcttagctcttaaaccactccgaatgcacctacgccaacaaggtggacgccttagtggttcata

SEQ ID NO: 4744 - DNA, 84 bp, Artificial Sequence
  Synthetic
tcaccagcagactttacgcagcttagctcttaaaccttccggagccgctcaagcccaacaaggtggacgccttagtggttcata

SEQ ID NO: 4745 - DNA, 84 bp, Artificial Sequence
  Synthetic
tcaccagcagactttacgcagcttagctcttaaacccacaagccggcctgcggtccaacaaggtggacgccttagtggttcata

SEQ ID NO: 4746 - DNA, 84 bp, Artificial Sequence
  Synthetic
tcaccagcagactttacgcagcttagctcttaaacgacggggccgcagctcctgccaacaaggtggacgccttagtggttcata

SEQ ID NO: 4747 - DNA, 84 bp, Artificial Sequence
  Synthetic
tcaccagcagactttacgcagcttagctcttaaactaccagcccgggccggacgccaacaaggtggacgccttagtggttcata

SEQ ID NO: 4748 - DNA, 84 bp, Artificial Sequence
  Synthetic
tcaccagcagactttacgcagcttagctcttaaacccactttcccgggcagcttccaacaaggtggacgccttagtggttcata

SEQ ID NO: 4749 - DNA, 84 bp, Artificial Sequence
  Synthetic
tcaccagcagactttacgcagcttagctcttaaactccgccgatctcctccctcccaacaaggtggacgccttagtggttcata

SEQ ID NO: 4750 - DNA, 84 bp, Artificial Sequence
  Synthetic
tcaccagcagactttacgcagcttagctcttaaacggggaacgaggcatctcgcccaacaaggtggacgccttagtggttcata

SEQ ID NO: 4751 - DNA, 84 bp, Artificial Sequence
  Synthetic
tcaccagcagactttacgcagcttagctcttaaaccagccttcttcgccttctcccaacaaggtggacgccttagtggttcata

SEQ ID NO: 4752 - DNA, 84 bp, Artificial Sequence
  Synthetic
tcaccagcagactttacgcagcttagctcttaaactcttcgccttctcctcggcccaacaaggtggacgccttagtggttcata

SEQ ID NO: 4753 - DNA, 84 bp, Artificial Sequence
  Synthetic
tcaccagcagactttacgcagcttagctcttaaaccaaccgctgctcagacagcccaacaaggtggacgccttagtggttcata

SEQ ID NO: 4754 - DNA, 84 bp, Artificial Sequence
  Synthetic
tcaccagcagactttacgcagcttagctcttaaacgcgctcaacaccgcacttcccaacaaggtggacgccttagtggttcata

SEQ ID NO: 4755 - DNA, 84 bp, Artificial Sequence
  Synthetic
tcaccagcagactttacgcagcttagctcttaaacacagagtcgccttggccgcccaacaaggtggacgccttagtggttcata

SEQ ID NO: 4756 - DNA, 84 bp, Artificial Sequence
  Synthetic
tcaccagcagactttacgcagcttagctcttaaactgttgggccccttctctccccaacaaggtggacgccttagtggttcata

SEQ ID NO: 4757 - DNA, 84 bp, Artificial Sequence
  Synthetic
tcaccagcagactttacgcagcttagctcttaaacgtattgtctctctccagctccaacaaggtggacgccttagtggttcata

SEQ ID NO: 4758 - DNA, 84 bp, Artificial Sequence
  Synthetic
tcaccagcagactttacgcagcttagctcttaaacctgtcgcctgagttcgcctccaacaaggtggacgccttagtggttcata

SEQ ID NO: 4759 - DNA, 84 bp, Artificial Sequence
  Synthetic
tcaccagcagactttacgcagcttagctcttaaacctagggccagggaggggagccaacaaggtggacgccttagtggttcata

SEQ ID NO: 4760 - DNA, 84 bp, Artificial Sequence
  Synthetic
tcaccagcagactttacgcagcttagctcttaaacgtccctcctacgcagccagccaacaaggtggacgccttagtggttcata

SEQ ID NO: 4761 - DNA, 84 bp, Artificial Sequence
  Synthetic
tcaccagcagactttacgcagcttagctcttaaacgtgttcacctttcgggcgcccaacaaggtggacgccttagtggttcata

SEQ ID NO: 4762 - DNA, 84 bp, Artificial Sequence
  Synthetic
tcaccagcagactttacgcagcttagctcttaaactattcgttgcggcagcgcaccaacaaggtggacgccttagtggttcata

SEQ ID NO: 4763 - DNA, 84 bp, Artificial Sequence
  Synthetic
tcaccagcagactttacgcagcttagctcttaaactattgtgcggcggcgccggccaacaaggtggacgccttagtggttcata

SEQ ID NO: 4764 - DNA, 84 bp, Artificial Sequence
  Synthetic
tcaccagcagactttacgcagcttagctcttaaacgagtcttgctccggccgcgccaacaaggtggacgccttagtggttcata

SEQ ID NO: 4765 - DNA, 84 bp, Artificial Sequence
  Synthetic
tcaccagcagactttacgcagcttagctcttaaaccacaatatggcgagcctcaccaacaaggtggacgccttagtggttcata

SEQ ID NO: 4766 - DNA, 84 bp, Artificial Sequence
  Synthetic
tcaccagcagactttacgcagcttagctcttaaacaacaggactgtgccaggccccaacaaggtggacgccttagtggttcata

SEQ ID NO: 4767 - DNA, 84 bp, Artificial Sequence
  Synthetic
tcaccagcagactttacgcagcttagctcttaaaccgcgggaacagaactcgcaccaacaaggtggacgccttagtggttcata

SEQ ID NO: 4768 - DNA, 84 bp, Artificial Sequence
  Synthetic
tcaccagcagactttacgcagcttagctcttaaacctgacccgcggcggagacaccaacaaggtggacgccttagtggttcata

SEQ ID NO: 4769 - DNA, 84 bp, Artificial Sequence
  Synthetic
tcaccagcagactttacgcagcttagctcttaaaccgagaaagatgccgccgccccaacaaggtggacgccttagtggttcata

SEQ ID NO: 4770 - DNA, 84 bp, Artificial Sequence
  Synthetic
tcaccagcagactttacgcagcttagctcttaaacgcccgggtcttccccctaaccaacaaggtggacgccttagtggttcata

SEQ ID NO: 4771 - DNA, 84 bp, Artificial Sequence
  Synthetic
tcaccagcagactttacgcagcttagctcttaaacaggagagctcctcgagaaaccaacaaggtggacgccttagtggttcata

SEQ ID NO: 4772 - DNA, 84 bp, Artificial Sequence
  Synthetic
tcaccagcagactttacgcagcttagctcttaaacccatcttggatttcaccggccaacaaggtggacgccttagtggttcata

SEQ ID NO: 4773 - DNA, 84 bp, Artificial Sequence
  Synthetic
tcaccagcagactttacgcagcttagctcttaaactcttggatttcaccggacgccaacaaggtggacgccttagtggttcata

SEQ ID NO: 4774 - DNA, 84 bp, Artificial Sequence
  Synthetic
tcaccagcagactttacgcagcttagctcttaaacgcaggagggtcagcctagcccaacaaggtggacgccttagtggttcata

SEQ ID NO: 4775 - DNA, 84 bp, Artificial Sequence
  Synthetic
tcaccagcagactttacgcagcttagctcttaaacgctccggccaccggcgcggccaacaaggtggacgccttagtggttcata

SEQ ID NO: 4776 - DNA, 84 bp, Artificial Sequence
  Synthetic
tcaccagcagactttacgcagcttagctcttaaacccgcaggcaccagctccggccaacaaggtggacgccttagtggttcata

SEQ ID NO: 4777 - DNA, 84 bp, Artificial Sequence
  Synthetic
tcaccagcagactttacgcagcttagctcttaaactgacctaggttctggctgcccaacaaggtggacgccttagtggttcata

SEQ ID NO: 4778 - DNA, 84 bp, Artificial Sequence
  Synthetic
tcaccagcagactttacgcagcttagctcttaaaccgcgttcatcccccgtcgcccaacaaggtggacgccttagtggttcata

SEQ ID NO: 4779 - DNA, 84 bp, Artificial Sequence
  Synthetic
tcaccagcagactttacgcagcttagctcttaaacgagaagttgcgcgcaccgcccaacaaggtggacgccttagtggttcata

SEQ ID NO: 4780 - DNA, 84 bp, Artificial Sequence
  Synthetic
tcaccagcagactttacgcagcttagctcttaaaccgcaacagctccagcttccccaacaaggtggacgccttagtggttcata

SEQ ID NO: 4781 - DNA, 84 bp, Artificial Sequence
  Synthetic
tcaccagcagactttacgcagcttagctcttaaacccactgcgccgctctggctccaacaaggtggacgccttagtggttcata

SEQ ID NO: 4782 - DNA, 84 bp, Artificial Sequence
  Synthetic
tcaccagcagactttacgcagcttagctcttaaacctgcgccgctctggctactccaacaaggtggacgccttagtggttcata

SEQ ID NO: 4783 - DNA, 84 bp, Artificial Sequence
  Synthetic
tcaccagcagactttacgcagcttagctcttaaacgagaaaagtagccagagcgccaacaaggtggacgccttagtggttcata

SEQ ID NO: 4784 - DNA, 84 bp, Artificial Sequence
  Synthetic
tcaccagcagactttacgcagcttagctcttaaacttctgcgatcacaggattcccaacaaggtggacgccttagtggttcata

SEQ ID NO: 4785 - DNA, 84 bp, Artificial Sequence
  Synthetic
tcaccagcagactttacgcagcttagctcttaaacccgggaatcctgtgatcgcccaacaaggtggacgccttagtggttcata

SEQ ID NO: 4786 - DNA, 84 bp, Artificial Sequence
  Synthetic
tcaccagcagactttacgcagcttagctcttaaactgggtttcccgccagccgcccaacaaggtggacgccttagtggttcata

SEQ ID NO: 4787 - DNA, 84 bp, Artificial Sequence
  Synthetic
tcaccagcagactttacgcagcttagctcttaaacttcggacagctcgaagcctccaacaaggtggacgccttagtggttcata

SEQ ID NO: 4788 - DNA, 84 bp, Artificial Sequence
  Synthetic
tcaccagcagactttacgcagcttagctcttaaacaccttctcctcagcctgagccaacaaggtggacgccttagtggttcata

SEQ ID NO: 4789 - DNA, 84 bp, Artificial Sequence
  Synthetic
tcaccagcagactttacgcagcttagctcttaaactccgtggagccccagacgaccaacaaggtggacgccttagtggttcata

SEQ ID NO: 4790 - DNA, 84 bp, Artificial Sequence
  Synthetic
tcaccagcagactttacgcagcttagctcttaaacgatccagcccggccgcttcccaacaaggtggacgccttagtggttcata

SEQ ID NO: 4791 - DNA, 84 bp, Artificial Sequence
  Synthetic
tcaccagcagactttacgcagcttagctcttaaacgcggcctaagggtttctccccaacaaggtggacgccttagtggttcata

SEQ ID NO: 4792 - DNA, 84 bp, Artificial Sequence
  Synthetic
tcaccagcagactttacgcagcttagctcttaaaccctccaactacgacagcacccaacaaggtggacgccttagtggttcata

SEQ ID NO: 4793 - DNA, 84 bp, Artificial Sequence
  Synthetic
tcaccagcagactttacgcagcttagctcttaaacgtcgagggccgccacccgtccaacaaggtggacgccttagtggttcata

SEQ ID NO: 4794 - DNA, 84 bp, Artificial Sequence
  Synthetic
tcaccagcagactttacgcagcttagctcttaaacgtccccagctgtcagccagccaacaaggtggacgccttagtggttcata

SEQ ID NO: 4795 - DNA, 84 bp, Artificial Sequence
  Synthetic
tcaccagcagactttacgcagcttagctcttaaacgcgaaaactctgagctggcccaacaaggtggacgccttagtggttcata

SEQ ID NO: 4796 - DNA, 84 bp, Artificial Sequence
  Synthetic
tcaccagcagactttacgcagcttagctcttaaacgagttaccatgcggccgttccaacaaggtggacgccttagtggttcata

SEQ ID NO: 4797 - DNA, 84 bp, Artificial Sequence
  Synthetic
tcaccagcagactttacgcagcttagctcttaaacgcgcctgagttaccatgcgccaacaaggtggacgccttagtggttcata

SEQ ID NO: 4798 - DNA, 84 bp, Artificial Sequence
  Synthetic
tcaccagcagactttacgcagcttagctcttaaacctcgcgcgttctcctggccccaacaaggtggacgccttagtggttcata

SEQ ID NO: 4799 - DNA, 84 bp, Artificial Sequence
  Synthetic
tcaccagcagactttacgcagcttagctcttaaacttgtaagtgtgggtgcatgccaacaaggtggacgccttagtggttcata

SEQ ID NO: 4800 - DNA, 84 bp, Artificial Sequence
  Synthetic
tcaccagcagactttacgcagcttagctcttaaacctcgtttccgtaaagcgcaccaacaaggtggacgccttagtggttcata

SEQ ID NO: 4801 - DNA, 84 bp, Artificial Sequence
  Synthetic
tcaccagcagactttacgcagcttagctcttaaactgatgctcaccaactgccaccaacaaggtggacgccttagtggttcata

SEQ ID NO: 4802 - DNA, 84 bp, Artificial Sequence
  Synthetic
tcaccagcagactttacgcagcttagctcttaaacgtcccgctcaagccaaccgccaacaaggtggacgccttagtggttcata

SEQ ID NO: 4803 - DNA, 84 bp, Artificial Sequence
  Synthetic
tcaccagcagactttacgcagcttagctcttaaacgtcatactgtgccgcctccccaacaaggtggacgccttagtggttcata

SEQ ID NO: 4804 - DNA, 84 bp, Artificial Sequence
  Synthetic
tcaccagcagactttacgcagcttagctcttaaaccagctccggtcccgctcaaccaacaaggtggacgccttagtggttcata

SEQ ID NO: 4805 - DNA, 84 bp, Artificial Sequence
  Synthetic
tcaccagcagactttacgcagcttagctcttaaactggtttaccaattccccttccaacaaggtggacgccttagtggttcata

SEQ ID NO: 4806 - DNA, 84 bp, Artificial Sequence
  Synthetic
tcaccagcagactttacgcagcttagctcttaaacagatccaggatgtcagcagccaacaaggtggacgccttagtggttcata

SEQ ID NO: 4807 - DNA, 84 bp, Artificial Sequence
  Synthetic
tcaccagcagactttacgcagcttagctcttaaacaattatcccatgtacttcaccaacaaggtggacgccttagtggttcata

SEQ ID NO: 4808 - DNA, 84 bp, Artificial Sequence
  Synthetic
tcaccagcagactttacgcagcttagctcttaaactgatattgggatgcagactccaacaaggtggacgccttagtggttcata

SEQ ID NO: 4809 - DNA, 84 bp, Artificial Sequence
  Synthetic
tcaccagcagactttacgcagcttagctcttaaacctgcagtgatagactggagccaacaaggtggacgccttagtggttcata

SEQ ID NO: 4810 - DNA, 84 bp, Artificial Sequence
  Synthetic
tcaccagcagactttacgcagcttagctcttaaactaccttgatattgggatgcccaacaaggtggacgccttagtggttcata

SEQ ID NO: 4811 - DNA, 84 bp, Artificial Sequence
  Synthetic
tcaccagcagactttacgcagcttagctcttaaacccatcttcggaggcggctgccaacaaggtggacgccttagtggttcata

SEQ ID NO: 4812 - DNA, 84 bp, Artificial Sequence
  Synthetic
tcaccagcagactttacgcagcttagctcttaaaccggtcggacctgcggcctcccaacaaggtggacgccttagtggttcata

SEQ ID NO: 4813 - DNA, 84 bp, Artificial Sequence
  Synthetic
tcaccagcagactttacgcagcttagctcttaaacctcccgatgaagcagctgcccaacaaggtggacgccttagtggttcata

SEQ ID NO: 4814 - DNA, 84 bp, Artificial Sequence
  Synthetic
tcaccagcagactttacgcagcttagctcttaaaccgactgagcagctggatgtccaacaaggtggacgccttagtggttcata

SEQ ID NO: 4815 - DNA, 84 bp, Artificial Sequence
  Synthetic
tcaccagcagactttacgcagcttagctcttaaactcccacaaggccgtgtcgtccaacaaggtggacgccttagtggttcata

SEQ ID NO: 4816 - DNA, 84 bp, Artificial Sequence
  Synthetic
tcaccagcagactttacgcagcttagctcttaaacccacgtggtctcctcaagcccaacaaggtggacgccttagtggttcata

SEQ ID NO: 4817 - DNA, 84 bp, Artificial Sequence
  Synthetic
tcaccagcagactttacgcagcttagctcttaaacccataccgggccccgctctccaacaaggtggacgccttagtggttcata

SEQ ID NO: 4818 - DNA, 84 bp, Artificial Sequence
  Synthetic
tcaccagcagactttacgcagcttagctcttaaactaccgggccccgctctaggccaacaaggtggacgccttagtggttcata

SEQ ID NO: 4819 - DNA, 84 bp, Artificial Sequence
  Synthetic
tcaccagcagactttacgcagcttagctcttaaacctctctggctggcgtcggcccaacaaggtggacgccttagtggttcata

SEQ ID NO: 4820 - DNA, 84 bp, Artificial Sequence
  Synthetic
tcaccagcagactttacgcagcttagctcttaaactcgcctggaactaccgccgccaacaaggtggacgccttagtggttcata

SEQ ID NO: 4821 - DNA, 84 bp, Artificial Sequence
  Synthetic
tcaccagcagactttacgcagcttagctcttaaacccgtcgcctggaactaccgccaacaaggtggacgccttagtggttcata

SEQ ID NO: 4822 - DNA, 84 bp, Artificial Sequence
  Synthetic
tcaccagcagactttacgcagcttagctcttaaactaccaccgtccgccgtcgcccaacaaggtggacgccttagtggttcata

SEQ ID NO: 4823 - DNA, 84 bp, Artificial Sequence
  Synthetic
tcaccagcagactttacgcagcttagctcttaaactctgtcctccgggatccggccaacaaggtggacgccttagtggttcata

SEQ ID NO: 4824 - DNA, 84 bp, Artificial Sequence
  Synthetic
tcaccagcagactttacgcagcttagctcttaaacttggcggttgccccatcagccaacaaggtggacgccttagtggttcata

SEQ ID NO: 4825 - DNA, 84 bp, Artificial Sequence
  Synthetic
tcaccagcagactttacgcagcttagctcttaaaccagccgttggcggttgcccccaacaaggtggacgccttagtggttcata

SEQ ID NO: 4826 - DNA, 84 bp, Artificial Sequence
  Synthetic
tcaccagcagactttacgcagcttagctcttaaacccacacggaggcctgagtcccaacaaggtggacgccttagtggttcata

SEQ ID NO: 4827 - DNA, 84 bp, Artificial Sequence
  Synthetic
tcaccagcagactttacgcagcttagctcttaaactcactaccgcctccgacgcccaacaaggtggacgccttagtggttcata

SEQ ID NO: 4828 - DNA, 84 bp, Artificial Sequence
  Synthetic
tcaccagcagactttacgcagcttagctcttaaacccgtcactaccgcctccgaccaacaaggtggacgccttagtggttcata

SEQ ID NO: 4829 - DNA, 84 bp, Artificial Sequence
  Synthetic
tcaccagcagactttacgcagcttagctcttaaaccagcgcctagctgccgggcccaacaaggtggacgccttagtggttcata

SEQ ID NO: 4830 - DNA, 84 bp, Artificial Sequence
  Synthetic
tcaccagcagactttacgcagcttagctcttaaacttgagcttcccgggctccaccaacaaggtggacgccttagtggttcata

SEQ ID NO: 4831 - DNA, 84 bp, Artificial Sequence
  Synthetic
tcaccagcagactttacgcagcttagctcttaaacccgggagacccagaaaccaccaacaaggtggacgccttagtggttcata

SEQ ID NO: 4832 - DNA, 84 bp, Artificial Sequence
  Synthetic
tcaccagcagactttacgcagcttagctcttaaaccccggaggtgagcgcgtctccaacaaggtggacgccttagtggttcata

SEQ ID NO: 4833 - DNA, 84 bp, Artificial Sequence
  Synthetic
tcaccagcagactttacgcagcttagctcttaaaccgtaattcaccgacatcctccaacaaggtggacgccttagtggttcata

SEQ ID NO: 4834 - DNA, 84 bp, Artificial Sequence
  Synthetic
tcaccagcagactttacgcagcttagctcttaaacccgggaggccgcacttgccccaacaaggtggacgccttagtggttcata

SEQ ID NO: 4835 - DNA, 84 bp, Artificial Sequence
  Synthetic
tcaccagcagactttacgcagcttagctcttaaactcaccaagtcgctctgtctccaacaaggtggacgccttagtggttcata

SEQ ID NO: 4836 - DNA, 84 bp, Artificial Sequence
  Synthetic
tcaccagcagactttacgcagcttagctcttaaacaccccttcgggccgtggagccaacaaggtggacgccttagtggttcata

SEQ ID NO: 4837 - DNA, 84 bp, Artificial Sequence
  Synthetic
tcaccagcagactttacgcagcttagctcttaaacagtcgctctgtctccatcaccaacaaggtggacgccttagtggttcata

SEQ ID NO: 4838 - DNA, 84 bp, Artificial Sequence
  Synthetic
tcaccagcagactttacgcagcttagctcttaaacgtacgtgcccctctcctgtccaacaaggtggacgccttagtggttcata

SEQ ID NO: 4839 - DNA, 84 bp, Artificial Sequence
  Synthetic
tcaccagcagactttacgcagcttagctcttaaacccggatagtccccgagagcccaacaaggtggacgccttagtggttcata

SEQ ID NO: 4840 - DNA, 84 bp, Artificial Sequence
  Synthetic
tcaccagcagactttacgcagcttagctcttaaacgatagtccccgagagcttgccaacaaggtggacgccttagtggttcata

SEQ ID NO: 4841 - DNA, 84 bp, Artificial Sequence
  Synthetic
tcaccagcagactttacgcagcttagctcttaaaccggtcggacttctacacccccaacaaggtggacgccttagtggttcata

SEQ ID NO: 4842 - DNA, 84 bp, Artificial Sequence
  Synthetic
tcaccagcagactttacgcagcttagctcttaaacccagacaggagaggggcacccaacaaggtggacgccttagtggttcata

SEQ ID NO: 4843 - DNA, 84 bp, Artificial Sequence
  Synthetic
tcaccagcagactttacgcagcttagctcttaaacacctccggcgccgccgcggccaacaaggtggacgccttagtggttcata

SEQ ID NO: 4844 - DNA, 84 bp, Artificial Sequence
  Synthetic
tcaccagcagactttacgcagcttagctcttaaacccgcggcaccttcttaacgccaacaaggtggacgccttagtggttcata

SEQ ID NO: 4845 - DNA, 84 bp, Artificial Sequence
  Synthetic
tcaccagcagactttacgcagcttagctcttaaaccccgggtgccgactcccagccaacaaggtggacgccttagtggttcata

SEQ ID NO: 4846 - DNA, 84 bp, Artificial Sequence
  Synthetic
tcaccagcagactttacgcagcttagctcttaaactctgtttctgtactctgggccaacaaggtggacgccttagtggttcata

SEQ ID NO: 4847 - DNA, 84 bp, Artificial Sequence
  Synthetic
tcaccagcagactttacgcagcttagctcttaaacctctgagtcacccagagtaccaacaaggtggacgccttagtggttcata

SEQ ID NO: 4848 - DNA, 84 bp, Artificial Sequence
  Synthetic
tcaccagcagactttacgcagcttagctcttaaacgcacactcctcgcgagcaaccaacaaggtggacgccttagtggttcata

SEQ ID NO: 4849 - DNA, 84 bp, Artificial Sequence
  Synthetic
tcaccagcagactttacgcagcttagctcttaaacctcgtttggcggcggcggcccaacaaggtggacgccttagtggttcata

SEQ ID NO: 4850 - DNA, 84 bp, Artificial Sequence
  Synthetic
tcaccagcagactttacgcagcttagctcttaaacccgccaaacgaggggaagcccaacaaggtggacgccttagtggttcata

SEQ ID NO: 4851 - DNA, 84 bp, Artificial Sequence
  Synthetic
tcaccagcagactttacgcagcttagctcttaaactcgacttcccggcgcctccccaacaaggtggacgccttagtggttcata

SEQ ID NO: 4852 - DNA, 84 bp, Artificial Sequence
  Synthetic
tcaccagcagactttacgcagcttagctcttaaacccggcgcttacctcacggcccaacaaggtggacgccttagtggttcata

SEQ ID NO: 4853 - DNA, 84 bp, Artificial Sequence
  Synthetic
tcaccagcagactttacgcagcttagctcttaaaccggggctctaggttccaccccaacaaggtggacgccttagtggttcata

SEQ ID NO: 4854 - DNA, 84 bp, Artificial Sequence
  Synthetic
tcaccagcagactttacgcagcttagctcttaaaccccgagagcgcgccttccaccaacaaggtggacgccttagtggttcata

SEQ ID NO: 4855 - DNA, 84 bp, Artificial Sequence
  Synthetic
tcaccagcagactttacgcagcttagctcttaaactagcatgcactccacctctccaacaaggtggacgccttagtggttcata

SEQ ID NO: 4856 - DNA, 84 bp, Artificial Sequence
  Synthetic
tcaccagcagactttacgcagcttagctcttaaaccgtcaacttccgggcggatccaacaaggtggacgccttagtggttcata

SEQ ID NO: 4857 - DNA, 84 bp, Artificial Sequence
  Synthetic
tcaccagcagactttacgcagcttagctcttaaacatcagcttcctctcagctgccaacaaggtggacgccttagtggttcata

SEQ ID NO: 4858 - DNA, 84 bp, Artificial Sequence
  Synthetic
tcaccagcagactttacgcagcttagctcttaaactattgtagcggccaggcctccaacaaggtggacgccttagtggttcata

SEQ ID NO: 4859 - DNA, 84 bp, Artificial Sequence
  Synthetic
tcaccagcagactttacgcagcttagctcttaaacctacgatctccacttggatccaacaaggtggacgccttagtggttcata

SEQ ID NO: 4860 - DNA, 84 bp, Artificial Sequence
  Synthetic
tcaccagcagactttacgcagcttagctcttaaacttcaggcctggccgctacaccaacaaggtggacgccttagtggttcata

SEQ ID NO: 4861 - DNA, 84 bp, Artificial Sequence
  Synthetic
tcaccagcagactttacgcagcttagctcttaaacggtcgtcgtctgcggcggcccaacaaggtggacgccttagtggttcata

SEQ ID NO: 4862 - DNA, 84 bp, Artificial Sequence
  Synthetic
tcaccagcagactttacgcagcttagctcttaaacccgcagacgacgaccaggcccaacaaggtggacgccttagtggttcata

SEQ ID NO: 4863 - DNA, 84 bp, Artificial Sequence
  Synthetic
tcaccagcagactttacgcagcttagctcttaaaccagacgacgaccaggccgcccaacaaggtggacgccttagtggttcata

SEQ ID NO: 4864 - DNA, 84 bp, Artificial Sequence
  Synthetic
tcaccagcagactttacgcagcttagctcttaaacccgtatgttccgaggttctccaacaaggtggacgccttagtggttcata

SEQ ID NO: 4865 - DNA, 84 bp, Artificial Sequence
  Synthetic
tcaccagcagactttacgcagcttagctcttaaactcactctggaggcgactagccaacaaggtggacgccttagtggttcata

SEQ ID NO: 4866 - DNA, 84 bp, Artificial Sequence
  Synthetic
tcaccagcagactttacgcagcttagctcttaaacccagagtgaggggtatctcccaacaaggtggacgccttagtggttcata

SEQ ID NO: 4867 - DNA, 84 bp, Artificial Sequence
  Synthetic
tcaccagcagactttacgcagcttagctcttaaacttgttgtccctcgtggcgtccaacaaggtggacgccttagtggttcata

SEQ ID NO: 4868 - DNA, 84 bp, Artificial Sequence
  Synthetic
tcaccagcagactttacgcagcttagctcttaaacgtcgtccccacagcctggcccaacaaggtggacgccttagtggttcata

SEQ ID NO: 4869 - DNA, 84 bp, Artificial Sequence
  Synthetic
tcaccagcagactttacgcagcttagctcttaaacggtcgttcccgcgcgcaccccaacaaggtggacgccttagtggttcata

SEQ ID NO: 4870 - DNA, 84 bp, Artificial Sequence
  Synthetic
tcaccagcagactttacgcagcttagctcttaaactgacccagttcgacaacgtccaacaaggtggacgccttagtggttcata

SEQ ID NO: 4871 - DNA, 84 bp, Artificial Sequence
  Synthetic
tcaccagcagactttacgcagcttagctcttaaacccatcttctccggctcgggccaacaaggtggacgccttagtggttcata

SEQ ID NO: 4872 - DNA, 84 bp, Artificial Sequence
  Synthetic
tcaccagcagactttacgcagcttagctcttaaaccggtccctttgtcccgcccccaacaaggtggacgccttagtggttcata

SEQ ID NO: 4873 - DNA, 84 bp, Artificial Sequence
  Synthetic
tcaccagcagactttacgcagcttagctcttaaacatagtctcgctgccctgagccaacaaggtggacgccttagtggttcata

SEQ ID NO: 4874 - DNA, 84 bp, Artificial Sequence
  Synthetic
tcaccagcagactttacgcagcttagctcttaaacctagtcgccccgctctatcccaacaaggtggacgccttagtggttcata

SEQ ID NO: 4875 - DNA, 84 bp, Artificial Sequence
  Synthetic
tcaccagcagactttacgcagcttagctcttaaaccccgtgccggccggccggcccaacaaggtggacgccttagtggttcata

SEQ ID NO: 4876 - DNA, 84 bp, Artificial Sequence
  Synthetic
tcaccagcagactttacgcagcttagctcttaaacgacatcgctccgtcccgtcccaacaaggtggacgccttagtggttcata

SEQ ID NO: 4877 - DNA, 84 bp, Artificial Sequence
  Synthetic
tcaccagcagactttacgcagcttagctcttaaaccgatccggactccgggctcccaacaaggtggacgccttagtggttcata

SEQ ID NO: 4878 - DNA, 84 bp, Artificial Sequence
  Synthetic
tcaccagcagactttacgcagcttagctcttaaaccgtcgagtccactccgtgcccaacaaggtggacgccttagtggttcata

SEQ ID NO: 4879 - DNA, 84 bp, Artificial Sequence
  Synthetic
tcaccagcagactttacgcagcttagctcttaaaccccctcgcgtccggagcttccaacaaggtggacgccttagtggttcata

SEQ ID NO: 4880 - DNA, 84 bp, Artificial Sequence
  Synthetic
tcaccagcagactttacgcagcttagctcttaaacgcgggtgagtgtttccaagccaacaaggtggacgccttagtggttcata

SEQ ID NO: 4881 - DNA, 84 bp, Artificial Sequence
  Synthetic
tcaccagcagactttacgcagcttagctcttaaactttgtcccgcgctcgccccccaacaaggtggacgccttagtggttcata

SEQ ID NO: 4882 - DNA, 84 bp, Artificial Sequence
  Synthetic
tcaccagcagactttacgcagcttagctcttaaaccagttctcgggcgtacggcccaacaaggtggacgccttagtggttcata

SEQ ID NO: 4883 - DNA, 84 bp, Artificial Sequence
  Synthetic
tcaccagcagactttacgcagcttagctcttaaacgcgcgggctacctcagttcccaacaaggtggacgccttagtggttcata

SEQ ID NO: 4884 - DNA, 84 bp, Artificial Sequence
  Synthetic
tcaccagcagactttacgcagcttagctcttaaacgtcctactgccgccggcgcccaacaaggtggacgccttagtggttcata

SEQ ID NO: 4885 - DNA, 84 bp, Artificial Sequence
  Synthetic
tcaccagcagactttacgcagcttagctcttaaacgcgttatcaagcgcccgcgccaacaaggtggacgccttagtggttcata

SEQ ID NO: 4886 - DNA, 84 bp, Artificial Sequence
  Synthetic
tcaccagcagactttacgcagcttagctcttaaacccacgcctcacccgcgttaccaacaaggtggacgccttagtggttcata

SEQ ID NO: 4887 - DNA, 84 bp, Artificial Sequence
  Synthetic
tcaccagcagactttacgcagcttagctcttaaaccgcctcacccgcgttatcaccaacaaggtggacgccttagtggttcata

SEQ ID NO: 4888 - DNA, 84 bp, Artificial Sequence
  Synthetic
tcaccagcagactttacgcagcttagctcttaaacgttgggccgggccagacttccaacaaggtggacgccttagtggttcata

SEQ ID NO: 4889 - DNA, 84 bp, Artificial Sequence
  Synthetic
tcaccagcagactttacgcagcttagctcttaaaccaccgctctcaacacccgcccaacaaggtggacgccttagtggttcata

SEQ ID NO: 4890 - DNA, 84 bp, Artificial Sequence
  Synthetic
tcaccagcagactttacgcagcttagctcttaaacaccggccgtgctcacgcacccaacaaggtggacgccttagtggttcata

SEQ ID NO: 4891 - DNA, 84 bp, Artificial Sequence
  Synthetic
tcaccagcagactttacgcagcttagctcttaaactgcggccgtgcggttgctgccaacaaggtggacgccttagtggttcata

SEQ ID NO: 4892 - DNA, 84 bp, Artificial Sequence
  Synthetic
tcaccagcagactttacgcagcttagctcttaaactgcggttgctgctccggggccaacaaggtggacgccttagtggttcata

SEQ ID NO: 4893 - DNA, 84 bp, Artificial Sequence
  Synthetic
tcaccagcagactttacgcagcttagctcttaaacctgtctccacaggctggacccaacaaggtggacgccttagtggttcata

SEQ ID NO: 4894 - DNA, 84 bp, Artificial Sequence
  Synthetic
tcaccagcagactttacgcagcttagctcttaaacaccggtgtttcggctccggccaacaaggtggacgccttagtggttcata

SEQ ID NO: 4895 - DNA, 84 bp, Artificial Sequence
  Synthetic
tcaccagcagactttacgcagcttagctcttaaacacctccccgctcctaccggccaacaaggtggacgccttagtggttcata

SEQ ID NO: 4896 - DNA, 84 bp, Artificial Sequence
  Synthetic
tcaccagcagactttacgcagcttagctcttaaacgtgtttcggctccgggtccccaacaaggtggacgccttagtggttcata

SEQ ID NO: 4897 - DNA, 84 bp, Artificial Sequence
  Synthetic
tcaccagcagactttacgcagcttagctcttaaacttctggatacatagaaattccaacaaggtggacgccttagtggttcata

SEQ ID NO: 4898 - DNA, 84 bp, Artificial Sequence
  Synthetic
tcaccagcagactttacgcagcttagctcttaaactggaattgacttggaccatccaacaaggtggacgccttagtggttcata

SEQ ID NO: 4899 - DNA, 84 bp, Artificial Sequence
  Synthetic
tcaccagcagactttacgcagcttagctcttaaaccttatgtgatagacagaagccaacaaggtggacgccttagtggttcata

SEQ ID NO: 4900 - DNA, 84 bp, Artificial Sequence
  Synthetic
tcaccagcagactttacgcagcttagctcttaaaccggatacttggtgccgccgccaacaaggtggacgccttagtggttcata

SEQ ID NO: 4901 - DNA, 84 bp, Artificial Sequence
  Synthetic
tcaccagcagactttacgcagcttagctcttaaaccggagctggaatgactggcccaacaaggtggacgccttagtggttcata

SEQ ID NO: 4902 - DNA, 84 bp, Artificial Sequence
  Synthetic
tcaccagcagactttacgcagcttagctcttaaacagtatccgcggagctggaaccaacaaggtggacgccttagtggttcata

SEQ ID NO: 4903 - DNA, 84 bp, Artificial Sequence
  Synthetic
tcaccagcagactttacgcagcttagctcttaaacatcccgtttccggttccttccaacaaggtggacgccttagtggttcata

SEQ ID NO: 4904 - DNA, 84 bp, Artificial Sequence
  Synthetic
tcaccagcagactttacgcagcttagctcttaaacctacttcctcacctggtccccaacaaggtggacgccttagtggttcata

SEQ ID NO: 4905 - DNA, 84 bp, Artificial Sequence
  Synthetic
tcaccagcagactttacgcagcttagctcttaaacccacagtcccggattcccaccaacaaggtggacgccttagtggttcata

SEQ ID NO: 4906 - DNA, 84 bp, Artificial Sequence
  Synthetic
tcaccagcagactttacgcagcttagctcttaaacacctggtgagcgccatcttccaacaaggtggacgccttagtggttcata

SEQ ID NO: 4907 - DNA, 84 bp, Artificial Sequence
  Synthetic
tcaccagcagactttacgcagcttagctcttaaaccttcttccagcgcgagcgaccaacaaggtggacgccttagtggttcata

SEQ ID NO: 4908 - DNA, 84 bp, Artificial Sequence
  Synthetic
tcaccagcagactttacgcagcttagctcttaaacgggtttagttcacccgctcccaacaaggtggacgccttagtggttcata

SEQ ID NO: 4909 - DNA, 84 bp, Artificial Sequence
  Synthetic
tcaccagcagactttacgcagcttagctcttaaacttccggtatccgtacggggccaacaaggtggacgccttagtggttcata

SEQ ID NO: 4910 - DNA, 84 bp, Artificial Sequence
  Synthetic
tcaccagcagactttacgcagcttagctcttaaacaggtatccagcctttccggccaacaaggtggacgccttagtggttcata

SEQ ID NO: 4911 - DNA, 84 bp, Artificial Sequence
  Synthetic
tcaccagcagactttacgcagcttagctcttaaactacgggggaggttctcttcccaacaaggtggacgccttagtggttcata

SEQ ID NO: 4912 - DNA, 84 bp, Artificial Sequence
  Synthetic
tcaccagcagactttacgcagcttagctcttaaactgtcctaggctgcgcccttccaacaaggtggacgccttagtggttcata

SEQ ID NO: 4913 - DNA, 84 bp, Artificial Sequence
  Synthetic
tcaccagcagactttacgcagcttagctcttaaacatggggcccgaggcctcgtccaacaaggtggacgccttagtggttcata

SEQ ID NO: 4914 - DNA, 84 bp, Artificial Sequence
  Synthetic
tcaccagcagactttacgcagcttagctcttaaacttggggcgtggctgcgtgcccaacaaggtggacgccttagtggttcata

SEQ ID NO: 4915 - DNA, 84 bp, Artificial Sequence
  Synthetic
tcaccagcagactttacgcagcttagctcttaaaccggctaggcggcttggggtccaacaaggtggacgccttagtggttcata

SEQ ID NO: 4916 - DNA, 84 bp, Artificial Sequence
  Synthetic
tcaccagcagactttacgcagcttagctcttaaacggactagctcctaggagatccaacaaggtggacgccttagtggttcata

SEQ ID NO: 4917 - DNA, 84 bp, Artificial Sequence
  Synthetic
tcaccagcagactttacgcagcttagctcttaaactctcgagagccggcatctcccaacaaggtggacgccttagtggttcata

SEQ ID NO: 4918 - DNA, 84 bp, Artificial Sequence
  Synthetic
tcaccagcagactttacgcagcttagctcttaaaccaggaggcccggaaatgctccaacaaggtggacgccttagtggttcata

SEQ ID NO: 4919 - DNA, 84 bp, Artificial Sequence
  Synthetic
tcaccagcagactttacgcagcttagctcttaaacccaccactcgctcggaatcccaacaaggtggacgccttagtggttcata

SEQ ID NO: 4920 - DNA, 84 bp, Artificial Sequence
  Synthetic
tcaccagcagactttacgcagcttagctcttaaacagccctcccgacggactgaccaacaaggtggacgccttagtggttcata

SEQ ID NO: 4921 - DNA, 84 bp, Artificial Sequence
  Synthetic
tcaccagcagactttacgcagcttagctcttaaacctgcgggctcgctctgccgccaacaaggtggacgccttagtggttcata

SEQ ID NO: 4922 - DNA, 84 bp, Artificial Sequence
  Synthetic
tcaccagcagactttacgcagcttagctcttaaacccatatccgtgcgccgagcccaacaaggtggacgccttagtggttcata

SEQ ID NO: 4923 - DNA, 84 bp, Artificial Sequence
  Synthetic
tcaccagcagactttacgcagcttagctcttaaacgcagcggcaccacgtctccccaacaaggtggacgccttagtggttcata

SEQ ID NO: 4924 - DNA, 84 bp, Artificial Sequence
  Synthetic
tcaccagcagactttacgcagcttagctcttaaacccagtttgccgttcacccgccaacaaggtggacgccttagtggttcata

SEQ ID NO: 4925 - DNA, 84 bp, Artificial Sequence
  Synthetic
tcaccagcagactttacgcagcttagctcttaaactcaccactatcggcaagtcccaacaaggtggacgccttagtggttcata

SEQ ID NO: 4926 - DNA, 84 bp, Artificial Sequence
  Synthetic
tcaccagcagactttacgcagcttagctcttaaacctatcggcaagtcccgagcccaacaaggtggacgccttagtggttcata

SEQ ID NO: 4927 - DNA, 84 bp, Artificial Sequence
  Synthetic
tcaccagcagactttacgcagcttagctcttaaacgacgatctaacccgagcagccaacaaggtggacgccttagtggttcata

SEQ ID NO: 4928 - DNA, 84 bp, Artificial Sequence
  Synthetic
tcaccagcagactttacgcagcttagctcttaaactcttcggtaaagggtgtccccaacaaggtggacgccttagtggttcata

SEQ ID NO: 4929 - DNA, 84 bp, Artificial Sequence
  Synthetic
tcaccagcagactttacgcagcttagctcttaaactcacctgacgatctaacccccaacaaggtggacgccttagtggttcata

SEQ ID NO: 4930 - DNA, 84 bp, Artificial Sequence
  Synthetic
tcaccagcagactttacgcagcttagctcttaaacgggaagcttttcccgcgtgccaacaaggtggacgccttagtggttcata

SEQ ID NO: 4931 - DNA, 84 bp, Artificial Sequence
  Synthetic
tcaccagcagactttacgcagcttagctcttaaactacacaggccacagagaggccaacaaggtggacgccttagtggttcata

SEQ ID NO: 4932 - DNA, 84 bp, Artificial Sequence
  Synthetic
tcaccagcagactttacgcagcttagctcttaaacccggaagccgtacacaggcccaacaaggtggacgccttagtggttcata

SEQ ID NO: 4933 - DNA, 84 bp, Artificial Sequence
  Synthetic
tcaccagcagactttacgcagcttagctcttaaacccagatggcgggttaggatccaacaaggtggacgccttagtggttcata

SEQ ID NO: 4934 - DNA, 84 bp, Artificial Sequence
  Synthetic
tcaccagcagactttacgcagcttagctcttaaacccctctgctggccgcggtgccaacaaggtggacgccttagtggttcata

SEQ ID NO: 4935 - DNA, 84 bp, Artificial Sequence
  Synthetic
tcaccagcagactttacgcagcttagctcttaaacaacccgccatctggtggcaccaacaaggtggacgccttagtggttcata

SEQ ID NO: 4936 - DNA, 84 bp, Artificial Sequence
  Synthetic
tcaccagcagactttacgcagcttagctcttaaacatcgccttccccagcagttccaacaaggtggacgccttagtggttcata

SEQ ID NO: 4937 - DNA, 84 bp, Artificial Sequence
  Synthetic
tcaccagcagactttacgcagcttagctcttaaactcccttccgaggcccgactccaacaaggtggacgccttagtggttcata

SEQ ID NO: 4938 - DNA, 84 bp, Artificial Sequence
  Synthetic
tcaccagcagactttacgcagcttagctcttaaacccccatcatctccagcgcgccaacaaggtggacgccttagtggttcata

SEQ ID NO: 4939 - DNA, 84 bp, Artificial Sequence
  Synthetic
tcaccagcagactttacgcagcttagctcttaaactgagtagaattcgagggtgccaacaaggtggacgccttagtggttcata

SEQ ID NO: 4940 - DNA, 84 bp, Artificial Sequence
  Synthetic
tcaccagcagactttacgcagcttagctcttaaactcgaattctactcagggacccaacaaggtggacgccttagtggttcata

SEQ ID NO: 4941 - DNA, 84 bp, Artificial Sequence
  Synthetic
tcaccagcagactttacgcagcttagctcttaaaccgggagcttccgtccctgaccaacaaggtggacgccttagtggttcata

SEQ ID NO: 4942 - DNA, 84 bp, Artificial Sequence
  Synthetic
tcaccagcagactttacgcagcttagctcttaaacccggaagggcagcggcgggccaacaaggtggacgccttagtggttcata

SEQ ID NO: 4943 - DNA, 84 bp, Artificial Sequence
  Synthetic
tcaccagcagactttacgcagcttagctcttaaacttccgggggcgaaagattcccaacaaggtggacgccttagtggttcata

SEQ ID NO: 4944 - DNA, 84 bp, Artificial Sequence
  Synthetic
tcaccagcagactttacgcagcttagctcttaaacccgctgcccttccgggggcccaacaaggtggacgccttagtggttcata

SEQ ID NO: 4945 - DNA, 84 bp, Artificial Sequence
  Synthetic
tcaccagcagactttacgcagcttagctcttaaacacttctttctcccgggtcgccaacaaggtggacgccttagtggttcata

SEQ ID NO: 4946 - DNA, 84 bp, Artificial Sequence
  Synthetic
tcaccagcagactttacgcagcttagctcttaaacttggatggctcccagcccgccaacaaggtggacgccttagtggttcata

SEQ ID NO: 4947 - DNA, 84 bp, Artificial Sequence
  Synthetic
tcaccagcagactttacgcagcttagctcttaaacctacgcctcgcgtcacttcccaacaaggtggacgccttagtggttcata

SEQ ID NO: 4948 - DNA, 84 bp, Artificial Sequence
  Synthetic
tcaccagcagactttacgcagcttagctcttaaaccccattggctggcgcctcgccaacaaggtggacgccttagtggttcata

SEQ ID NO: 4949 - DNA, 84 bp, Artificial Sequence
  Synthetic
tcaccagcagactttacgcagcttagctcttaaacccacggggccggccgcggcccaacaaggtggacgccttagtggttcata

SEQ ID NO: 4950 - DNA, 84 bp, Artificial Sequence
  Synthetic
tcaccagcagactttacgcagcttagctcttaaacgtggggggcccgggaaagcccaacaaggtggacgccttagtggttcata

SEQ ID NO: 4951 - DNA, 84 bp, Artificial Sequence
  Synthetic
tcaccagcagactttacgcagcttagctcttaaacctaagtgggcccgcccaagccaacaaggtggacgccttagtggttcata

SEQ ID NO: 4952 - DNA, 84 bp, Artificial Sequence
  Synthetic
tcaccagcagactttacgcagcttagctcttaaacccgcaactgtgcgcggggcccaacaaggtggacgccttagtggttcata

SEQ ID NO: 4953 - DNA, 84 bp, Artificial Sequence
  Synthetic
tcaccagcagactttacgcagcttagctcttaaactctagagccccgcccctaaccaacaaggtggacgccttagtggttcata

SEQ ID NO: 4954 - DNA, 84 bp, Artificial Sequence
  Synthetic
tcaccagcagactttacgcagcttagctcttaaacggacctcgcgtgattctcgccaacaaggtggacgccttagtggttcata

SEQ ID NO: 4955 - DNA, 84 bp, Artificial Sequence
  Synthetic
tcaccagcagactttacgcagcttagctcttaaacgcactctcccaatgacccgccaacaaggtggacgccttagtggttcata

SEQ ID NO: 4956 - DNA, 84 bp, Artificial Sequence
  Synthetic
tcaccagcagactttacgcagcttagctcttaaacggaatcccgcactctcccaccaacaaggtggacgccttagtggttcata

SEQ ID NO: 4957 - DNA, 84 bp, Artificial Sequence
  Synthetic
tcaccagcagactttacgcagcttagctcttaaaccctcggtccgccggagcctccaacaaggtggacgccttagtggttcata

SEQ ID NO: 4958 - DNA, 84 bp, Artificial Sequence
  Synthetic
tcaccagcagactttacgcagcttagctcttaaactcccccctcggtccgccggccaacaaggtggacgccttagtggttcata

SEQ ID NO: 4959 - DNA, 84 bp, Artificial Sequence
  Synthetic
tcaccagcagactttacgcagcttagctcttaaaccccgccagctacccgccggccaacaaggtggacgccttagtggttcata

SEQ ID NO: 4960 - DNA, 84 bp, Artificial Sequence
  Synthetic
tcaccagcagactttacgcagcttagctcttaaacttgaactgccagccgcccgccaacaaggtggacgccttagtggttcata

SEQ ID NO: 4961 - DNA, 84 bp, Artificial Sequence
  Synthetic
tcaccagcagactttacgcagcttagctcttaaacacgcgctccgggccgctcaccaacaaggtggacgccttagtggttcata

SEQ ID NO: 4962 - DNA, 84 bp, Artificial Sequence
  Synthetic
tcaccagcagactttacgcagcttagctcttaaactcatagaccgtatgtagcaccaacaaggtggacgccttagtggttcata

SEQ ID NO: 4963 - DNA, 84 bp, Artificial Sequence
  Synthetic
tcaccagcagactttacgcagcttagctcttaaaccctatgccgccgagcgtcgccaacaaggtggacgccttagtggttcata

SEQ ID NO: 4964 - DNA, 84 bp, Artificial Sequence
  Synthetic
tcaccagcagactttacgcagcttagctcttaaaccgtagtgtcggtggagccgccaacaaggtggacgccttagtggttcata

SEQ ID NO: 4965 - DNA, 84 bp, Artificial Sequence
  Synthetic
tcaccagcagactttacgcagcttagctcttaaacacactacgcggacgcctccccaacaaggtggacgccttagtggttcata

SEQ ID NO: 4966 - DNA, 84 bp, Artificial Sequence
  Synthetic
tcaccagcagactttacgcagcttagctcttaaaccaggtgaagcgcgcttgtgccaacaaggtggacgccttagtggttcata

SEQ ID NO: 4967 - DNA, 84 bp, Artificial Sequence
  Synthetic
tcaccagcagactttacgcagcttagctcttaaaccaactcctccacaagcgcgccaacaaggtggacgccttagtggttcata

SEQ ID NO: 4968 - DNA, 84 bp, Artificial Sequence
  Synthetic
tcaccagcagactttacgcagcttagctcttaaacgaggtggccccttctccgcccaacaaggtggacgccttagtggttcata

SEQ ID NO: 4969 - DNA, 84 bp, Artificial Sequence
  Synthetic
tcaccagcagactttacgcagcttagctcttaaacttagtcatgtcgggtaggtccaacaaggtggacgccttagtggttcata

SEQ ID NO: 4970 - DNA, 84 bp, Artificial Sequence
  Synthetic
tcaccagcagactttacgcagcttagctcttaaacgagctgtactgagggcggcccaacaaggtggacgccttagtggttcata

SEQ ID NO: 4971 - DNA, 84 bp, Artificial Sequence
  Synthetic
tcaccagcagactttacgcagcttagctcttaaaccagtacagctccggccgccccaacaaggtggacgccttagtggttcata

SEQ ID NO: 4972 - DNA, 84 bp, Artificial Sequence
  Synthetic
tcaccagcagactttacgcagcttagctcttaaacctcaccagcgatctgcagtccaacaaggtggacgccttagtggttcata

SEQ ID NO: 4973 - DNA, 84 bp, Artificial Sequence
  Synthetic
tcaccagcagactttacgcagcttagctcttaaacccttccttacgaacgaagcccaacaaggtggacgccttagtggttcata

SEQ ID NO: 4974 - DNA, 84 bp, Artificial Sequence
  Synthetic
tcaccagcagactttacgcagcttagctcttaaacccgcgggcttcgttcgtaaccaacaaggtggacgccttagtggttcata

SEQ ID NO: 4975 - DNA, 84 bp, Artificial Sequence
  Synthetic
tcaccagcagactttacgcagcttagctcttaaacgccatcgggcccaggtctcccaacaaggtggacgccttagtggttcata

SEQ ID NO: 4976 - DNA, 84 bp, Artificial Sequence
  Synthetic
tcaccagcagactttacgcagcttagctcttaaacctgtctgggtactgccagcccaacaaggtggacgccttagtggttcata

SEQ ID NO: 4977 - DNA, 84 bp, Artificial Sequence
  Synthetic
tcaccagcagactttacgcagcttagctcttaaacatggctggcagtacccagaccaacaaggtggacgccttagtggttcata

SEQ ID NO: 4978 - DNA, 84 bp, Artificial Sequence
  Synthetic
tcaccagcagactttacgcagcttagctcttaaacacgcttgcctcggatcccgccaacaaggtggacgccttagtggttcata

SEQ ID NO: 4979 - DNA, 84 bp, Artificial Sequence
  Synthetic
tcaccagcagactttacgcagcttagctcttaaaccggatcccgccccttcggcccaacaaggtggacgccttagtggttcata

SEQ ID NO: 4980 - DNA, 84 bp, Artificial Sequence
  Synthetic
tcaccagcagactttacgcagcttagctcttaaaccaggtacgtgttgggcggcccaacaaggtggacgccttagtggttcata

SEQ ID NO: 4981 - DNA, 84 bp, Artificial Sequence
  Synthetic
tcaccagcagactttacgcagcttagctcttaaacttacctaggtcggtggagcccaacaaggtggacgccttagtggttcata

SEQ ID NO: 4982 - DNA, 84 bp, Artificial Sequence
  Synthetic
tcaccagcagactttacgcagcttagctcttaaacactccatcttcctgccgccccaacaaggtggacgccttagtggttcata

SEQ ID NO: 4983 - DNA, 84 bp, Artificial Sequence
  Synthetic
tcaccagcagactttacgcagcttagctcttaaaccctctgcaccgcccctttaccaacaaggtggacgccttagtggttcata

SEQ ID NO: 4984 - DNA, 84 bp, Artificial Sequence
  Synthetic
tcaccagcagactttacgcagcttagctcttaaacaggaactcgtgctcggggcccaacaaggtggacgccttagtggttcata

SEQ ID NO: 4985 - DNA, 84 bp, Artificial Sequence
  Synthetic
tcaccagcagactttacgcagcttagctcttaaaccagattcgcgctgagaggcccaacaaggtggacgccttagtggttcata

SEQ ID NO: 4986 - DNA, 84 bp, Artificial Sequence
  Synthetic
tcaccagcagactttacgcagcttagctcttaaacgcgggagcctcgcccggacccaacaaggtggacgccttagtggttcata

SEQ ID NO: 4987 - DNA, 84 bp, Artificial Sequence
  Synthetic
tcaccagcagactttacgcagcttagctcttaaacccatgttaaatggctcgctccaacaaggtggacgccttagtggttcata

SEQ ID NO: 4988 - DNA, 84 bp, Artificial Sequence
  Synthetic
tcaccagcagactttacgcagcttagctcttaaaccttcaggcgccgagcaacgccaacaaggtggacgccttagtggttcata

SEQ ID NO: 4989 - DNA, 84 bp, Artificial Sequence
  Synthetic
tcaccagcagactttacgcagcttagctcttaaacctgaggaaacatcctccgcccaacaaggtggacgccttagtggttcata

SEQ ID NO: 4990 - DNA, 84 bp, Artificial Sequence
  Synthetic
tcaccagcagactttacgcagcttagctcttaaacgcccgctgccgtcgctactccaacaaggtggacgccttagtggttcata

SEQ ID NO: 4991 - DNA, 84 bp, Artificial Sequence
  Synthetic
tcaccagcagactttacgcagcttagctcttaaactcccggctcccgcggccatccaacaaggtggacgccttagtggttcata

SEQ ID NO: 4992 - DNA, 84 bp, Artificial Sequence
  Synthetic
tcaccagcagactttacgcagcttagctcttaaactcgctactcccgcctcctcccaacaaggtggacgccttagtggttcata

SEQ ID NO: 4993 - DNA, 84 bp, Artificial Sequence
  Synthetic
tcaccagcagactttacgcagcttagctcttaaacacgccgccgctcttcagttccaacaaggtggacgccttagtggttcata

SEQ ID NO: 4994 - DNA, 84 bp, Artificial Sequence
  Synthetic
tcaccagcagactttacgcagcttagctcttaaacccgctcttcagtttgcccgccaacaaggtggacgccttagtggttcata

SEQ ID NO: 4995 - DNA, 84 bp, Artificial Sequence
  Synthetic
tcaccagcagactttacgcagcttagctcttaaacagaagatgtctccgacgccccaacaaggtggacgccttagtggttcata

SEQ ID NO: 4996 - DNA, 84 bp, Artificial Sequence
  Synthetic
tcaccagcagactttacgcagcttagctcttaaacactacaggtgagagtgcagccaacaaggtggacgccttagtggttcata

SEQ ID NO: 4997 - DNA, 84 bp, Artificial Sequence
  Synthetic
tcaccagcagactttacgcagcttagctcttaaacctccccgagttcgaaactcccaacaaggtggacgccttagtggttcata

SEQ ID NO: 4998 - DNA, 84 bp, Artificial Sequence
  Synthetic
tcaccagcagactttacgcagcttagctcttaaacctcactagtagcagaagccccaacaaggtggacgccttagtggttcata

SEQ ID NO: 4999 - DNA, 84 bp, Artificial Sequence
  Synthetic
tcaccagcagactttacgcagcttagctcttaaacggaactcgcgcgtcttgctccaacaaggtggacgccttagtggttcata

SEQ ID NO: 5000 - DNA, 84 bp, Artificial Sequence
  Synthetic
tcaccagcagactttacgcagcttagctcttaaacggcgcacagcgccaaggtgccaacaaggtggacgccttagtggttcata

SEQ ID NO: 5001 - DNA, 84 bp, Artificial Sequence
  Synthetic
tcaccagcagactttacgcagcttagctcttaaaccggctcgatggccccgtggccaacaaggtggacgccttagtggttcata

SEQ ID NO: 5002 - DNA, 84 bp, Artificial Sequence
  Synthetic
tcaccagcagactttacgcagcttagctcttaaaccactacccgcggtccccggccaacaaggtggacgccttagtggttcata

SEQ ID NO: 5003 - DNA, 84 bp, Artificial Sequence
  Synthetic
tcaccagcagactttacgcagcttagctcttaaacggttcttggagctgtgaggccaacaaggtggacgccttagtggttcata

SEQ ID NO: 5004 - DNA, 84 bp, Artificial Sequence
  Synthetic
tcaccagcagactttacgcagcttagctcttaaacccggcagtggcttactcccccaacaaggtggacgccttagtggttcata

SEQ ID NO: 5005 - DNA, 84 bp, Artificial Sequence
  Synthetic
tcaccagcagactttacgcagcttagctcttaaacctctaggcacgtaaggcctccaacaaggtggacgccttagtggttcata

SEQ ID NO: 5006 - DNA, 84 bp, Artificial Sequence
  Synthetic
tcaccagcagactttacgcagcttagctcttaaaccccgtcttccgcgcccgcgccaacaaggtggacgccttagtggttcata

SEQ ID NO: 5007 - DNA, 84 bp, Artificial Sequence
  Synthetic
tcaccagcagactttacgcagcttagctcttaaaccgaggttctgcgcgggcgcccaacaaggtggacgccttagtggttcata

SEQ ID NO: 5008 - DNA, 84 bp, Artificial Sequence
  Synthetic
tcaccagcagactttacgcagcttagctcttaaactcagtcacggctcccatggccaacaaggtggacgccttagtggttcata

SEQ ID NO: 5009 - DNA, 84 bp, Artificial Sequence
  Synthetic
tcaccagcagactttacgcagcttagctcttaaacaccgccgcctcagcttgcgccaacaaggtggacgccttagtggttcata

SEQ ID NO: 5010 - DNA, 84 bp, Artificial Sequence
  Synthetic
tcaccagcagactttacgcagcttagctcttaaaccctcagcttgcgccgccgcccaacaaggtggacgccttagtggttcata

SEQ ID NO: 5011 - DNA, 84 bp, Artificial Sequence
  Synthetic
tcaccagcagactttacgcagcttagctcttaaaccttctgagcgggctccgttccaacaaggtggacgccttagtggttcata

SEQ ID NO: 5012 - DNA, 84 bp, Artificial Sequence
  Synthetic
tcaccagcagactttacgcagcttagctcttaaacccccacagcgcgcccagcgccaacaaggtggacgccttagtggttcata

SEQ ID NO: 5013 - DNA, 84 bp, Artificial Sequence
  Synthetic
tcaccagcagactttacgcagcttagctcttaaaccagagatcgcagctgcagcccaacaaggtggacgccttagtggttcata

SEQ ID NO: 5014 - DNA, 84 bp, Artificial Sequence
  Synthetic
tcaccagcagactttacgcagcttagctcttaaactagtctcccgcgccgcgttccaacaaggtggacgccttagtggttcata

SEQ ID NO: 5015 - DNA, 84 bp, Artificial Sequence
  Synthetic
tcaccagcagactttacgcagcttagctcttaaacgtggctcctccgggcttctccaacaaggtggacgccttagtggttcata

SEQ ID NO: 5016 - DNA, 84 bp, Artificial Sequence
  Synthetic
tcaccagcagactttacgcagcttagctcttaaaccgttcccgggtctcaccggccaacaaggtggacgccttagtggttcata

SEQ ID NO: 5017 - DNA, 84 bp, Artificial Sequence
  Synthetic
tcaccagcagactttacgcagcttagctcttaaacgtgttttctgcgtgaggtgccaacaaggtggacgccttagtggttcata

SEQ ID NO: 5018 - DNA, 84 bp, Artificial Sequence
  Synthetic
tcaccagcagactttacgcagcttagctcttaaacaggagttcccgagtatcgcccaacaaggtggacgccttagtggttcata

SEQ ID NO: 5019 - DNA, 84 bp, Artificial Sequence
  Synthetic
tcaccagcagactttacgcagcttagctcttaaacttctcgccccaggagttccccaacaaggtggacgccttagtggttcata

SEQ ID NO: 5020 - DNA, 84 bp, Artificial Sequence
  Synthetic
tcaccagcagactttacgcagcttagctcttaaacgatcccgcggcgatccgagccaacaaggtggacgccttagtggttcata

SEQ ID NO: 5021 - DNA, 84 bp, Artificial Sequence
  Synthetic
tcaccagcagactttacgcagcttagctcttaaacgaggaacttacggcgaagcccaacaaggtggacgccttagtggttcata

SEQ ID NO: 5022 - DNA, 84 bp, Artificial Sequence
  Synthetic
tcaccagcagactttacgcagcttagctcttaaactaagttcctcggggaccccccaacaaggtggacgccttagtggttcata

SEQ ID NO: 5023 - DNA, 84 bp, Artificial Sequence
  Synthetic
tcaccagcagactttacgcagcttagctcttaaaccccggcagtcaggcagcgtccaacaaggtggacgccttagtggttcata

SEQ ID NO: 5024 - DNA, 84 bp, Artificial Sequence
  Synthetic
tcaccagcagactttacgcagcttagctcttaaacacatgagtggggaccacctccaacaaggtggacgccttagtggttcata

SEQ ID NO: 5025 - DNA, 84 bp, Artificial Sequence
  Synthetic
tcaccagcagactttacgcagcttagctcttaaaccggcggcgacgctgcctgaccaacaaggtggacgccttagtggttcata

SEQ ID NO: 5026 - DNA, 84 bp, Artificial Sequence
  Synthetic
tcaccagcagactttacgcagcttagctcttaaaccttctccacagacgcgcgtccaacaaggtggacgccttagtggttcata

SEQ ID NO: 5027 - DNA, 84 bp, Artificial Sequence
  Synthetic
tcaccagcagactttacgcagcttagctcttaaacccgaccaagccgcttctccccaacaaggtggacgccttagtggttcata

SEQ ID NO: 5028 - DNA, 84 bp, Artificial Sequence
  Synthetic
tcaccagcagactttacgcagcttagctcttaaacgggcatctctctggccgccccaacaaggtggacgccttagtggttcata

SEQ ID NO: 5029 - DNA, 84 bp, Artificial Sequence
  Synthetic
tcaccagcagactttacgcagcttagctcttaaacccgccacggtcacctccctccaacaaggtggacgccttagtggttcata

SEQ ID NO: 5030 - DNA, 84 bp, Artificial Sequence
  Synthetic
tcaccagcagactttacgcagcttagctcttaaactcttgtccggcataacaccccaacaaggtggacgccttagtggttcata

SEQ ID NO: 5031 - DNA, 84 bp, Artificial Sequence
  Synthetic
tcaccagcagactttacgcagcttagctcttaaactctctccccggtgtgcaaaccaacaaggtggacgccttagtggttcata

SEQ ID NO: 5032 - DNA, 84 bp, Artificial Sequence
  Synthetic
tcaccagcagactttacgcagcttagctcttaaacgtatcttggcgtggaacttccaacaaggtggacgccttagtggttcata

SEQ ID NO: 5033 - DNA, 84 bp, Artificial Sequence
  Synthetic
tcaccagcagactttacgcagcttagctcttaaaccctcagcaccgaatccagtccaacaaggtggacgccttagtggttcata

SEQ ID NO: 5034 - DNA, 84 bp, Artificial Sequence
  Synthetic
tcaccagcagactttacgcagcttagctcttaaacttggagcttcagtcactgaccaacaaggtggacgccttagtggttcata

SEQ ID NO: 5035 - DNA, 84 bp, Artificial Sequence
  Synthetic
tcaccagcagactttacgcagcttagctcttaaacgagctggatccgcggtgcgccaacaaggtggacgccttagtggttcata

SEQ ID NO: 5036 - DNA, 84 bp, Artificial Sequence
  Synthetic
tcaccagcagactttacgcagcttagctcttaaacctatttccgggtccagccgccaacaaggtggacgccttagtggttcata

SEQ ID NO: 5037 - DNA, 84 bp, Artificial Sequence
  Synthetic
tcaccagcagactttacgcagcttagctcttaaactgttcccggggcggctaccccaacaaggtggacgccttagtggttcata

SEQ ID NO: 5038 - DNA, 84 bp, Artificial Sequence
  Synthetic
tcaccagcagactttacgcagcttagctcttaaacaactggggttcgcgatgccccaacaaggtggacgccttagtggttcata

SEQ ID NO: 5039 - DNA, 84 bp, Artificial Sequence
  Synthetic
tcaccagcagactttacgcagcttagctcttaaaccacttacctcgttggagccccaacaaggtggacgccttagtggttcata

SEQ ID NO: 5040 - DNA, 84 bp, Artificial Sequence
  Synthetic
tcaccagcagactttacgcagcttagctcttaaacccgactcgccgcccggagaccaacaaggtggacgccttagtggttcata

SEQ ID NO: 5041 - DNA, 84 bp, Artificial Sequence
  Synthetic
tcaccagcagactttacgcagcttagctcttaaaccacctcgactccgcctcttccaacaaggtggacgccttagtggttcata

SEQ ID NO: 5042 - DNA, 84 bp, Artificial Sequence
  Synthetic
tcaccagcagactttacgcagcttagctcttaaactacagtaacctcccaggcgccaacaaggtggacgccttagtggttcata

SEQ ID NO: 5043 - DNA, 84 bp, Artificial Sequence
  Synthetic
tcaccagcagactttacgcagcttagctcttaaaccctcttcctggaggatacgccaacaaggtggacgccttagtggttcata

SEQ ID NO: 5044 - DNA, 84 bp, Artificial Sequence
  Synthetic
tcaccagcagactttacgcagcttagctcttaaactggacggtggctctagactccaacaaggtggacgccttagtggttcata

SEQ ID NO: 5045 - DNA, 84 bp, Artificial Sequence
  Synthetic
tcaccagcagactttacgcagcttagctcttaaacagcagctacctgctccctgccaacaaggtggacgccttagtggttcata

SEQ ID NO: 5046 - DNA, 84 bp, Artificial Sequence
  Synthetic
tcaccagcagactttacgcagcttagctcttaaacgctccctggacggtggctcccaacaaggtggacgccttagtggttcata

SEQ ID NO: 5047 - DNA, 84 bp, Artificial Sequence
  Synthetic
tcaccagcagactttacgcagcttagctcttaaactccagatcgatccctaggtccaacaaggtggacgccttagtggttcata

SEQ ID NO: 5048 - DNA, 84 bp, Artificial Sequence
  Synthetic
tcaccagcagactttacgcagcttagctcttaaacgatcgatccctaggtcgccccaacaaggtggacgccttagtggttcata

SEQ ID NO: 5049 - DNA, 84 bp, Artificial Sequence
  Synthetic
tcaccagcagactttacgcagcttagctcttaaactaggtcgccgctgtcgccaccaacaaggtggacgccttagtggttcata

SEQ ID NO: 5050 - DNA, 84 bp, Artificial Sequence
  Synthetic
tcaccagcagactttacgcagcttagctcttaaacgggagtgctctggaaggctccaacaaggtggacgccttagtggttcata

SEQ ID NO: 5051 - DNA, 84 bp, Artificial Sequence
  Synthetic
tcaccagcagactttacgcagcttagctcttaaacctccaatactgcgcagcctccaacaaggtggacgccttagtggttcata

SEQ ID NO: 5052 - DNA, 84 bp, Artificial Sequence
  Synthetic
tcaccagcagactttacgcagcttagctcttaaacaggatggagacctcgggcaccaacaaggtggacgccttagtggttcata

SEQ ID NO: 5053 - DNA, 84 bp, Artificial Sequence
  Synthetic
tcaccagcagactttacgcagcttagctcttaaaccgtcagggggcccggccggccaacaaggtggacgccttagtggttcata

SEQ ID NO: 5054 - DNA, 84 bp, Artificial Sequence
  Synthetic
tcaccagcagactttacgcagcttagctcttaaacctccgaaaccaactaatccccaacaaggtggacgccttagtggttcata

SEQ ID NO: 5055 - DNA, 84 bp, Artificial Sequence
  Synthetic
tcaccagcagactttacgcagcttagctcttaaactcacgagcgtcgaagagacccaacaaggtggacgccttagtggttcata

SEQ ID NO: 5056 - DNA, 84 bp, Artificial Sequence
  Synthetic
tcaccagcagactttacgcagcttagctcttaaacgggttctccggcccagggcccaacaaggtggacgccttagtggttcata

SEQ ID NO: 5057 - DNA, 84 bp, Artificial Sequence
  Synthetic
tcaccagcagactttacgcagcttagctcttaaacctcggttccgcgcacaagcccaacaaggtggacgccttagtggttcata

SEQ ID NO: 5058 - DNA, 84 bp, Artificial Sequence
  Synthetic
tcaccagcagactttacgcagcttagctcttaaactgcgcggccggggcttaccccaacaaggtggacgccttagtggttcata

SEQ ID NO: 5059 - DNA, 84 bp, Artificial Sequence
  Synthetic
tcaccagcagactttacgcagcttagctcttaaacagtcactactgcctgcctgccaacaaggtggacgccttagtggttcata

SEQ ID NO: 5060 - DNA, 84 bp, Artificial Sequence
  Synthetic
tcaccagcagactttacgcagcttagctcttaaacgcctgcctgctacggtgagccaacaaggtggacgccttagtggttcata

SEQ ID NO: 5061 - DNA, 84 bp, Artificial Sequence
  Synthetic
tcaccagcagactttacgcagcttagctcttaaaccgggagagtgtgcagccgaccaacaaggtggacgccttagtggttcata

SEQ ID NO: 5062 - DNA, 84 bp, Artificial Sequence
  Synthetic
tcaccagcagactttacgcagcttagctcttaaactgtttcgcgctccgagccgccaacaaggtggacgccttagtggttcata

SEQ ID NO: 5063 - DNA, 84 bp, Artificial Sequence
  Synthetic
tcaccagcagactttacgcagcttagctcttaaacctgagtagtcgtcgccgccccaacaaggtggacgccttagtggttcata

SEQ ID NO: 5064 - DNA, 84 bp, Artificial Sequence
  Synthetic
tcaccagcagactttacgcagcttagctcttaaactcgccggttccggctgcgcccaacaaggtggacgccttagtggttcata

SEQ ID NO: 5065 - DNA, 84 bp, Artificial Sequence
  Synthetic
tcaccagcagactttacgcagcttagctcttaaaccgtcgcaaccgctcggccgccaacaaggtggacgccttagtggttcata

SEQ ID NO: 5066 - DNA, 84 bp, Artificial Sequence
  Synthetic
tcaccagcagactttacgcagcttagctcttaaacccaagtgggtgcggcctgcccaacaaggtggacgccttagtggttcata

SEQ ID NO: 5067 - DNA, 84 bp, Artificial Sequence
  Synthetic
tcaccagcagactttacgcagcttagctcttaaaccagccgagccctcgtcgcaccaacaaggtggacgccttagtggttcata

SEQ ID NO: 5068 - DNA, 84 bp, Artificial Sequence
  Synthetic
tcaccagcagactttacgcagcttagctcttaaaccggctcgtggttgtcccgcccaacaaggtggacgccttagtggttcata

SEQ ID NO: 5069 - DNA, 84 bp, Artificial Sequence
  Synthetic
tcaccagcagactttacgcagcttagctcttaaacccgcggctcgtggttgtccccaacaaggtggacgccttagtggttcata

SEQ ID NO: 5070 - DNA, 84 bp, Artificial Sequence
  Synthetic
tcaccagcagactttacgcagcttagctcttaaaccgacagtgccatggcgggaccaacaaggtggacgccttagtggttcata

SEQ ID NO: 5071 - DNA, 84 bp, Artificial Sequence
  Synthetic
tcaccagcagactttacgcagcttagctcttaaacctccgaagtcgagggtcggccaacaaggtggacgccttagtggttcata

SEQ ID NO: 5072 - DNA, 84 bp, Artificial Sequence
  Synthetic
tcaccagcagactttacgcagcttagctcttaaacagaggaaccgcgctgcctcccaacaaggtggacgccttagtggttcata

SEQ ID NO: 5073 - DNA, 84 bp, Artificial Sequence
  Synthetic
tcaccagcagactttacgcagcttagctcttaaacctgggtgcttccgcctcccccaacaaggtggacgccttagtggttcata

SEQ ID NO: 5074 - DNA, 84 bp, Artificial Sequence
  Synthetic
tcaccagcagactttacgcagcttagctcttaaacggccggggtcgacatgctcccaacaaggtggacgccttagtggttcata

SEQ ID NO: 5075 - DNA, 84 bp, Artificial Sequence
  Synthetic
tcaccagcagactttacgcagcttagctcttaaacgcatgagcctcctccgggcccaacaaggtggacgccttagtggttcata

SEQ ID NO: 5076 - DNA, 84 bp, Artificial Sequence
  Synthetic
tcaccagcagactttacgcagcttagctcttaaacttcagcggggcgcggttccccaacaaggtggacgccttagtggttcata

SEQ ID NO: 5077 - DNA, 84 bp, Artificial Sequence
  Synthetic
tcaccagcagactttacgcagcttagctcttaaactttgtctcgggacttccctccaacaaggtggacgccttagtggttcata

SEQ ID NO: 5078 - DNA, 84 bp, Artificial Sequence
  Synthetic
tcaccagcagactttacgcagcttagctcttaaacccacctgtccgctacgctcccaacaaggtggacgccttagtggttcata

SEQ ID NO: 5079 - DNA, 84 bp, Artificial Sequence
  Synthetic
tcaccagcagactttacgcagcttagctcttaaacctcggtcctccacctgtccccaacaaggtggacgccttagtggttcata

SEQ ID NO: 5080 - DNA, 84 bp, Artificial Sequence
  Synthetic
tcaccagcagactttacgcagcttagctcttaaacgggacttccactcgtgcgtccaacaaggtggacgccttagtggttcata

SEQ ID NO: 5081 - DNA, 84 bp, Artificial Sequence
  Synthetic
tcaccagcagactttacgcagcttagctcttaaactaccaccgtcgcgggcaggccaacaaggtggacgccttagtggttcata

SEQ ID NO: 5082 - DNA, 84 bp, Artificial Sequence
  Synthetic
tcaccagcagactttacgcagcttagctcttaaacgctcctctcgcctcacgcaccaacaaggtggacgccttagtggttcata

SEQ ID NO: 5083 - DNA, 84 bp, Artificial Sequence
  Synthetic
tcaccagcagactttacgcagcttagctcttaaaccgttggtccgcgcgttgctccaacaaggtggacgccttagtggttcata

SEQ ID NO: 5084 - DNA, 84 bp, Artificial Sequence
  Synthetic
tcaccagcagactttacgcagcttagctcttaaacgcgcgacctctgactgttgccaacaaggtggacgccttagtggttcata

SEQ ID NO: 5085 - DNA, 84 bp, Artificial Sequence
  Synthetic
tcaccagcagactttacgcagcttagctcttaaacctgttgagcggagggtctcccaacaaggtggacgccttagtggttcata

SEQ ID NO: 5086 - DNA, 84 bp, Artificial Sequence
  Synthetic
tcaccagcagactttacgcagcttagctcttaaacgggccgggctgcgtgatttccaacaaggtggacgccttagtggttcata

SEQ ID NO: 5087 - DNA, 84 bp, Artificial Sequence
  Synthetic
tcaccagcagactttacgcagcttagctcttaaaccaggtcggttcccgggccgccaacaaggtggacgccttagtggttcata

SEQ ID NO: 5088 - DNA, 84 bp, Artificial Sequence
  Synthetic
tcaccagcagactttacgcagcttagctcttaaacacctgtggagaccgccatcccaacaaggtggacgccttagtggttcata

SEQ ID NO: 5089 - DNA, 84 bp, Artificial Sequence
  Synthetic
tcaccagcagactttacgcagcttagctcttaaaccctcagaccgcgggcgcttccaacaaggtggacgccttagtggttcata

SEQ ID NO: 5090 - DNA, 84 bp, Artificial Sequence
  Synthetic
tcaccagcagactttacgcagcttagctcttaaaccctcccttcggctcgtgacccaacaaggtggacgccttagtggttcata

SEQ ID NO: 5091 - DNA, 84 bp, Artificial Sequence
  Synthetic
tcaccagcagactttacgcagcttagctcttaaaccccttcggctcgtgacaacccaacaaggtggacgccttagtggttcata

SEQ ID NO: 5092 - DNA, 84 bp, Artificial Sequence
  Synthetic
tcaccagcagactttacgcagcttagctcttaaacccgcaccagctgccgccggccaacaaggtggacgccttagtggttcata

SEQ ID NO: 5093 - DNA, 84 bp, Artificial Sequence
  Synthetic
tcaccagcagactttacgcagcttagctcttaaacagctcgtcaaccacacgtcccaacaaggtggacgccttagtggttcata

SEQ ID NO: 5094 - DNA, 84 bp, Artificial Sequence
  Synthetic
tcaccagcagactttacgcagcttagctcttaaacccgagctcgtcaaccacacccaacaaggtggacgccttagtggttcata

SEQ ID NO: 5095 - DNA, 84 bp, Artificial Sequence
  Synthetic
tcaccagcagactttacgcagcttagctcttaaaccggatctcgggtggggtttccaacaaggtggacgccttagtggttcata

SEQ ID NO: 5096 - DNA, 84 bp, Artificial Sequence
  Synthetic
tcaccagcagactttacgcagcttagctcttaaacctgtagtcccggcggcgggccaacaaggtggacgccttagtggttcata

SEQ ID NO: 5097 - DNA, 84 bp, Artificial Sequence
  Synthetic
tcaccagcagactttacgcagcttagctcttaaaccttattggctccgcagcacccaacaaggtggacgccttagtggttcata

SEQ ID NO: 5098 - DNA, 84 bp, Artificial Sequence
  Synthetic
tcaccagcagactttacgcagcttagctcttaaacccgcgctcccaacgtgtggccaacaaggtggacgccttagtggttcata

SEQ ID NO: 5099 - DNA, 84 bp, Artificial Sequence
  Synthetic
tcaccagcagactttacgcagcttagctcttaaacgggtgtgtctctcgcgacgccaacaaggtggacgccttagtggttcata

SEQ ID NO: 5100 - DNA, 84 bp, Artificial Sequence
  Synthetic
tcaccagcagactttacgcagcttagctcttaaacaggtaggcctctcccgacgccaacaaggtggacgccttagtggttcata

SEQ ID NO: 5101 - DNA, 84 bp, Artificial Sequence
  Synthetic
tcaccagcagactttacgcagcttagctcttaaacctggacggccggctcggggccaacaaggtggacgccttagtggttcata

SEQ ID NO: 5102 - DNA, 84 bp, Artificial Sequence
  Synthetic
tcaccagcagactttacgcagcttagctcttaaaccgccggttcccgggtggcgccaacaaggtggacgccttagtggttcata

SEQ ID NO: 5103 - DNA, 84 bp, Artificial Sequence
  Synthetic
tcaccagcagactttacgcagcttagctcttaaacagccccgccaggaagcgacccaacaaggtggacgccttagtggttcata

SEQ ID NO: 5104 - DNA, 84 bp, Artificial Sequence
  Synthetic
tcaccagcagactttacgcagcttagctcttaaactcgaagccgccagccgctcccaacaaggtggacgccttagtggttcata

SEQ ID NO: 5105 - DNA, 84 bp, Artificial Sequence
  Synthetic
tcaccagcagactttacgcagcttagctcttaaacccgggtagggccctcgggcccaacaaggtggacgccttagtggttcata

SEQ ID NO: 5106 - DNA, 84 bp, Artificial Sequence
  Synthetic
tcaccagcagactttacgcagcttagctcttaaaccgcctcagctcccctcgaaccaacaaggtggacgccttagtggttcata

SEQ ID NO: 5107 - DNA, 84 bp, Artificial Sequence
  Synthetic
tcaccagcagactttacgcagcttagctcttaaacctgcttgttgcgctcctggccaacaaggtggacgccttagtggttcata

SEQ ID NO: 5108 - DNA, 84 bp, Artificial Sequence
  Synthetic
tcaccagcagactttacgcagcttagctcttaaactagcggttcaggcgttcggccaacaaggtggacgccttagtggttcata

SEQ ID NO: 5109 - DNA, 84 bp, Artificial Sequence
  Synthetic
tcaccagcagactttacgcagcttagctcttaaacccgaggggaacttggcgcgccaacaaggtggacgccttagtggttcata

SEQ ID NO: 5110 - DNA, 84 bp, Artificial Sequence
  Synthetic
tcaccagcagactttacgcagcttagctcttaaacgccgggcgggacagggggtccaacaaggtggacgccttagtggttcata

SEQ ID NO: 5111 - DNA, 84 bp, Artificial Sequence
  Synthetic
tcaccagcagactttacgcagcttagctcttaaacgccgcgggtcaccggtctcccaacaaggtggacgccttagtggttcata

SEQ ID NO: 5112 - DNA, 84 bp, Artificial Sequence
  Synthetic
tcaccagcagactttacgcagcttagctcttaaaccgggtcaccggtctcccgcccaacaaggtggacgccttagtggttcata

SEQ ID NO: 5113 - DNA, 84 bp, Artificial Sequence
  Synthetic
tcaccagcagactttacgcagcttagctcttaaaccccatgcggatgtgacattccaacaaggtggacgccttagtggttcata

SEQ ID NO: 5114 - DNA, 84 bp, Artificial Sequence
  Synthetic
tcaccagcagactttacgcagcttagctcttaaaccccgcttgctctcctcgctccaacaaggtggacgccttagtggttcata

SEQ ID NO: 5115 - DNA, 84 bp, Artificial Sequence
  Synthetic
tcaccagcagactttacgcagcttagctcttaaaccgacgacgacgccgaggagccaacaaggtggacgccttagtggttcata

SEQ ID NO: 5116 - DNA, 84 bp, Artificial Sequence
  Synthetic
tcaccagcagactttacgcagcttagctcttaaacgttcggtccccggggctctccaacaaggtggacgccttagtggttcata

SEQ ID NO: 5117 - DNA, 84 bp, Artificial Sequence
  Synthetic
tcaccagcagactttacgcagcttagctcttaaaccacctaccgctgacgcggcccaacaaggtggacgccttagtggttcata

SEQ ID NO: 5118 - DNA, 84 bp, Artificial Sequence
  Synthetic
tcaccagcagactttacgcagcttagctcttaaacccgcccggcagcgtaaccaccaacaaggtggacgccttagtggttcata

SEQ ID NO: 5119 - DNA, 84 bp, Artificial Sequence
  Synthetic
tcaccagcagactttacgcagcttagctcttaaacctcaccagctcggttttggccaacaaggtggacgccttagtggttcata

SEQ ID NO: 5120 - DNA, 84 bp, Artificial Sequence
  Synthetic
tcaccagcagactttacgcagcttagctcttaaactcttcttctttgtccggggccaacaaggtggacgccttagtggttcata

SEQ ID NO: 5121 - DNA, 84 bp, Artificial Sequence
  Synthetic
tcaccagcagactttacgcagcttagctcttaaacaccgagactgcgccgccacccaacaaggtggacgccttagtggttcata

SEQ ID NO: 5122 - DNA, 84 bp, Artificial Sequence
  Synthetic
tcaccagcagactttacgcagcttagctcttaaactcactccgcttcccacagtccaacaaggtggacgccttagtggttcata

SEQ ID NO: 5123 - DNA, 84 bp, Artificial Sequence
  Synthetic
tcaccagcagactttacgcagcttagctcttaaacctcgctccgtcactccgctccaacaaggtggacgccttagtggttcata

SEQ ID NO: 5124 - DNA, 84 bp, Artificial Sequence
  Synthetic
tcaccagcagactttacgcagcttagctcttaaactcgcctctctcggctctcaccaacaaggtggacgccttagtggttcata

SEQ ID NO: 5125 - DNA, 84 bp, Artificial Sequence
  Synthetic
tcaccagcagactttacgcagcttagctcttaaaccggtgctcgggccgccccgccaacaaggtggacgccttagtggttcata

SEQ ID NO: 5126 - DNA, 84 bp, Artificial Sequence
  Synthetic
tcaccagcagactttacgcagcttagctcttaaacccaccgtccgcagcccgagccaacaaggtggacgccttagtggttcata

SEQ ID NO: 5127 - DNA, 84 bp, Artificial Sequence
  Synthetic
tcaccagcagactttacgcagcttagctcttaaacccccgcctctgccggaaagccaacaaggtggacgccttagtggttcata

SEQ ID NO: 5128 - DNA, 84 bp, Artificial Sequence
  Synthetic
tcaccagcagactttacgcagcttagctcttaaaccccctcaggcctcccacagccaacaaggtggacgccttagtggttcata

SEQ ID NO: 5129 - DNA, 84 bp, Artificial Sequence
  Synthetic
tcaccagcagactttacgcagcttagctcttaaacggccgaggctctcgcgcgcccaacaaggtggacgccttagtggttcata

SEQ ID NO: 5130 - DNA, 84 bp, Artificial Sequence
  Synthetic
tcaccagcagactttacgcagcttagctcttaaacctccggagagccgcccgccccaacaaggtggacgccttagtggttcata

SEQ ID NO: 5131 - DNA, 84 bp, Artificial Sequence
  Synthetic
tcaccagcagactttacgcagcttagctcttaaacaggaccgtgctacccaggcccaacaaggtggacgccttagtggttcata

SEQ ID NO: 5132 - DNA, 84 bp, Artificial Sequence
  Synthetic
tcaccagcagactttacgcagcttagctcttaaacgtgcacagccccctcggccccaacaaggtggacgccttagtggttcata

SEQ ID NO: 5133 - DNA, 84 bp, Artificial Sequence
  Synthetic
tcaccagcagactttacgcagcttagctcttaaactggcggccggcactgaggaccaacaaggtggacgccttagtggttcata

SEQ ID NO: 5134 - DNA, 84 bp, Artificial Sequence
  Synthetic
tcaccagcagactttacgcagcttagctcttaaacgcttgtactcggcagcgcgccaacaaggtggacgccttagtggttcata

SEQ ID NO: 5135 - DNA, 84 bp, Artificial Sequence
  Synthetic
tcaccagcagactttacgcagcttagctcttaaacagtacaagccggcgcctccccaacaaggtggacgccttagtggttcata

SEQ ID NO: 5136 - DNA, 84 bp, Artificial Sequence
  Synthetic
tcaccagcagactttacgcagcttagctcttaaaccggggtatctatagtgctaccaacaaggtggacgccttagtggttcata

SEQ ID NO: 5137 - DNA, 84 bp, Artificial Sequence
  Synthetic
tcaccagcagactttacgcagcttagctcttaaacgagaccggatcgtcatgtcccaacaaggtggacgccttagtggttcata

SEQ ID NO: 5138 - DNA, 84 bp, Artificial Sequence
  Synthetic
tcaccagcagactttacgcagcttagctcttaaacgaccttgtcttcgtgagtcccaacaaggtggacgccttagtggttcata

SEQ ID NO: 5139 - DNA, 84 bp, Artificial Sequence
  Synthetic
tcaccagcagactttacgcagcttagctcttaaactaatgggccagagaccggaccaacaaggtggacgccttagtggttcata

SEQ ID NO: 5140 - DNA, 84 bp, Artificial Sequence
  Synthetic
tcaccagcagactttacgcagcttagctcttaaacccgccatctctggcccactccaacaaggtggacgccttagtggttcata

SEQ ID NO: 5141 - DNA, 84 bp, Artificial Sequence
  Synthetic
tcaccagcagactttacgcagcttagctcttaaactctctggcccactccgaggccaacaaggtggacgccttagtggttcata

SEQ ID NO: 5142 - DNA, 84 bp, Artificial Sequence
  Synthetic
tcaccagcagactttacgcagcttagctcttaaacactccgaggacctagctccccaacaaggtggacgccttagtggttcata

SEQ ID NO: 5143 - DNA, 84 bp, Artificial Sequence
  Synthetic
tcaccagcagactttacgcagcttagctcttaaaccgtctggactcccgccctgccaacaaggtggacgccttagtggttcata

SEQ ID NO: 5144 - DNA, 84 bp, Artificial Sequence
  Synthetic
tcaccagcagactttacgcagcttagctcttaaacagccatgttgcttgtctggccaacaaggtggacgccttagtggttcata

SEQ ID NO: 5145 - DNA, 84 bp, Artificial Sequence
  Synthetic
tcaccagcagactttacgcagcttagctcttaaaccggggacgcgaactgcgcaccaacaaggtggacgccttagtggttcata

SEQ ID NO: 5146 - DNA, 84 bp, Artificial Sequence
  Synthetic
tcaccagcagactttacgcagcttagctcttaaactcctgtggtctttacacagccaacaaggtggacgccttagtggttcata

SEQ ID NO: 5147 - DNA, 84 bp, Artificial Sequence
  Synthetic
tcaccagcagactttacgcagcttagctcttaaacgtggtctttacacagggacccaacaaggtggacgccttagtggttcata

SEQ ID NO: 5148 - DNA, 84 bp, Artificial Sequence
  Synthetic
tcaccagcagactttacgcagcttagctcttaaacagtgttccattcaagctaaccaacaaggtggacgccttagtggttcata

SEQ ID NO: 5149 - DNA, 84 bp, Artificial Sequence
  Synthetic
tcaccagcagactttacgcagcttagctcttaaactgtcgtgtcctgcagcagcccaacaaggtggacgccttagtggttcata

SEQ ID NO: 5150 - DNA, 84 bp, Artificial Sequence
  Synthetic
tcaccagcagactttacgcagcttagctcttaaacctcggaccccatactctacccaacaaggtggacgccttagtggttcata

SEQ ID NO: 5151 - DNA, 84 bp, Artificial Sequence
  Synthetic
tcaccagcagactttacgcagcttagctcttaaacggattggtgtctggaagaaccaacaaggtggacgccttagtggttcata

SEQ ID NO: 5152 - DNA, 84 bp, Artificial Sequence
  Synthetic
tcaccagcagactttacgcagcttagctcttaaacttcaccaactgcgcagactccaacaaggtggacgccttagtggttcata

SEQ ID NO: 5153 - DNA, 84 bp, Artificial Sequence
  Synthetic
tcaccagcagactttacgcagcttagctcttaaacatggaaggcactacacatcccaacaaggtggacgccttagtggttcata

SEQ ID NO: 5154 - DNA, 84 bp, Artificial Sequence
  Synthetic
tcaccagcagactttacgcagcttagctcttaaactcggggcgatgtgtagtgcccaacaaggtggacgccttagtggttcata

SEQ ID NO: 5155 - DNA, 84 bp, Artificial Sequence
  Synthetic
tcaccagcagactttacgcagcttagctcttaaacccgtcctgctcctctcggcccaacaaggtggacgccttagtggttcata

SEQ ID NO: 5156 - DNA, 84 bp, Artificial Sequence
  Synthetic
tcaccagcagactttacgcagcttagctcttaaaccacctcccgcgggttccgcccaacaaggtggacgccttagtggttcata

SEQ ID NO: 5157 - DNA, 84 bp, Artificial Sequence
  Synthetic
tcaccagcagactttacgcagcttagctcttaaaccccgcgggttccgcactccccaacaaggtggacgccttagtggttcata

SEQ ID NO: 5158 - DNA, 84 bp, Artificial Sequence
  Synthetic
tcaccagcagactttacgcagcttagctcttaaacctccgtgactctacttccgccaacaaggtggacgccttagtggttcata

SEQ ID NO: 5159 - DNA, 84 bp, Artificial Sequence
  Synthetic
tcaccagcagactttacgcagcttagctcttaaaccacttccggatcctacctcccaacaaggtggacgccttagtggttcata

SEQ ID NO: 5160 - DNA, 84 bp, Artificial Sequence
  Synthetic
tcaccagcagactttacgcagcttagctcttaaactgactctacttccggtatcccaacaaggtggacgccttagtggttcata

SEQ ID NO: 5161 - DNA, 84 bp, Artificial Sequence
  Synthetic
tcaccagcagactttacgcagcttagctcttaaacgaggaccggcaacatggtgccaacaaggtggacgccttagtggttcata

SEQ ID NO: 5162 - DNA, 84 bp, Artificial Sequence
  Synthetic
tcaccagcagactttacgcagcttagctcttaaacggaagaagcgaccaaagcgccaacaaggtggacgccttagtggttcata

SEQ ID NO: 5163 - DNA, 84 bp, Artificial Sequence
  Synthetic
tcaccagcagactttacgcagcttagctcttaaacgtcctcaggcgctttggtcccaacaaggtggacgccttagtggttcata

SEQ ID NO: 5164 - DNA, 84 bp, Artificial Sequence
  Synthetic
tcaccagcagactttacgcagcttagctcttaaacaaggtaagcgggccgttatccaacaaggtggacgccttagtggttcata

SEQ ID NO: 5165 - DNA, 84 bp, Artificial Sequence
  Synthetic
tcaccagcagactttacgcagcttagctcttaaactgcgccaaaggtaagcgggccaacaaggtggacgccttagtggttcata

SEQ ID NO: 5166 - DNA, 84 bp, Artificial Sequence
  Synthetic
tcaccagcagactttacgcagcttagctcttaaaccttacctttggcgcagggaccaacaaggtggacgccttagtggttcata

SEQ ID NO: 5167 - DNA, 84 bp, Artificial Sequence
  Synthetic
tcaccagcagactttacgcagcttagctcttaaacttccctcccgggccggtgcccaacaaggtggacgccttagtggttcata

SEQ ID NO: 5168 - DNA, 84 bp, Artificial Sequence
  Synthetic
tcaccagcagactttacgcagcttagctcttaaactcccgggccggtgcgccgcccaacaaggtggacgccttagtggttcata

SEQ ID NO: 5169 - DNA, 84 bp, Artificial Sequence
  Synthetic
tcaccagcagactttacgcagcttagctcttaaactagtggggcgggcccagccccaacaaggtggacgccttagtggttcata

SEQ ID NO: 5170 - DNA, 84 bp, Artificial Sequence
  Synthetic
tcaccagcagactttacgcagcttagctcttaaacaagtaactcgccctccttcccaacaaggtggacgccttagtggttcata

SEQ ID NO: 5171 - DNA, 84 bp, Artificial Sequence
  Synthetic
tcaccagcagactttacgcagcttagctcttaaacctcttttcgcggcgttctcccaacaaggtggacgccttagtggttcata

SEQ ID NO: 5172 - DNA, 84 bp, Artificial Sequence
  Synthetic
tcaccagcagactttacgcagcttagctcttaaacccgtgagcccaagtaactcccaacaaggtggacgccttagtggttcata

SEQ ID NO: 5173 - DNA, 84 bp, Artificial Sequence
  Synthetic
tcaccagcagactttacgcagcttagctcttaaactggcctcgggcgacaccctccaacaaggtggacgccttagtggttcata

SEQ ID NO: 5174 - DNA, 84 bp, Artificial Sequence
  Synthetic
tcaccagcagactttacgcagcttagctcttaaaccactctgctcgggcccggcccaacaaggtggacgccttagtggttcata

SEQ ID NO: 5175 - DNA, 84 bp, Artificial Sequence
  Synthetic
tcaccagcagactttacgcagcttagctcttaaacatgatcgctctgcagccgcccaacaaggtggacgccttagtggttcata

SEQ ID NO: 5176 - DNA, 84 bp, Artificial Sequence
  Synthetic
tcaccagcagactttacgcagcttagctcttaaaccgtcttccgcccgcactctccaacaaggtggacgccttagtggttcata

SEQ ID NO: 5177 - DNA, 84 bp, Artificial Sequence
  Synthetic
tcaccagcagactttacgcagcttagctcttaaacccattggcacaacacaactccaacaaggtggacgccttagtggttcata

SEQ ID NO: 5178 - DNA, 84 bp, Artificial Sequence
  Synthetic
tcaccagcagactttacgcagcttagctcttaaacttggcacaacacaactgtcccaacaaggtggacgccttagtggttcata

SEQ ID NO: 5179 - DNA, 84 bp, Artificial Sequence
  Synthetic
tcaccagcagactttacgcagcttagctcttaaacacgagttggagcctgaggtccaacaaggtggacgccttagtggttcata

SEQ ID NO: 5180 - DNA, 84 bp, Artificial Sequence
  Synthetic
tcaccagcagactttacgcagcttagctcttaaacccgttcacttgtcgcggtgccaacaaggtggacgccttagtggttcata

SEQ ID NO: 5181 - DNA, 84 bp, Artificial Sequence
  Synthetic
tcaccagcagactttacgcagcttagctcttaaaccagaatctccaactcccgcccaacaaggtggacgccttagtggttcata

SEQ ID NO: 5182 - DNA, 23 bp, Artificial Sequence
  Synthetic
gtctgataggcagcctgcactgg

SEQ ID NO: 5183 - DNA, 84 bp, Artificial Sequence
  Synthetic
gttttagtactctgtaatgaaaattacagaatctactaaaacaaggcaaaatgccgtgtttatctcgtcaacttgttggcgaga

SEQ ID NO: 5184 - DNA, 9 bp, Artificial Sequence
  Synthetic
agcctgcac

SEQ ID NO: 5185 - DNA, 15 bp, Artificial Sequence
  Synthetic
tggtgcggtgaattc

SEQ ID NO: 5186 - DNA, 24 bp, Artificial Sequence
  Synthetic
gaattcaccgcaccagtgcaggct

SEQ ID NO: 5187 - DNA, 22 bp, Artificial Sequence
  Synthetic
ggttcaacaaaatattgtcgag

SEQ ID NO: 5188 - DNA, 22 bp, Artificial Sequence
  Synthetic
gagaacgtcctaacaaatctgc

SEQ ID NO: 5189 - DNA, 14 bp, Artificial Sequence
  Synthetic
tggtgcggtgaatt

SEQ ID NO: 5190 - DNA, 23 bp, Artificial Sequence
  Synthetic
aattcaccgcaccagtgcaggct

SEQ ID NO: 5191 - DNA, 10 bp, Artificial Sequence
  Synthetic
cagcctgcac

SEQ ID NO: 5192 - DNA, 24 bp, Artificial Sequence
  Synthetic
aattcaccgcaccagtgcaggctg

SEQ ID NO: 5193 - DNA, 11 bp, Artificial Sequence
  Synthetic
gcagcctgcac

SEQ ID NO: 5194 - DNA, 25 bp, Artificial Sequence
  Synthetic
aattcaccgcaccagtgcaggctgc

SEQ ID NO: 5195 - DNA, 12 bp, Artificial Sequence
  Synthetic
ggcagcctgcac

SEQ ID NO: 5196 - DNA, 26 bp, Artificial Sequence
  Synthetic
aattcaccgcaccagtgcaggctgcc

SEQ ID NO: 5197 - DNA, 13 bp, Artificial Sequence
  Synthetic
aggcagcctgcac

SEQ ID NO: 5198 - DNA, 27 bp, Artificial Sequence
  Synthetic
aattcaccgcaccagtgcaggctgcct

SEQ ID NO: 5199 - DNA, 14 bp, Artificial Sequence
  Synthetic
taggcagcctgcac

SEQ ID NO: 5200 - DNA, 28 bp, Artificial Sequence
  Synthetic
aattcaccgcaccagtgcaggctgccta

SEQ ID NO: 5201 - DNA, 16 bp, Artificial Sequence
  Synthetic
tggtgcggtgaattct

SEQ ID NO: 5202 - DNA, 25 bp, Artificial Sequence
  Synthetic
agaattcaccgcaccagtgcaggct

SEQ ID NO: 5203 - DNA, 26 bp, Artificial Sequence
  Synthetic
agaattcaccgcaccagtgcaggctg

SEQ ID NO: 5204 - DNA, 27 bp, Artificial Sequence
  Synthetic
agaattcaccgcaccagtgcaggctgc

SEQ ID NO: 5205 - DNA, 28 bp, Artificial Sequence
  Synthetic
agaattcaccgcaccagtgcaggctgcc

SEQ ID NO: 5206 - DNA, 29 bp, Artificial Sequence
  Synthetic
agaattcaccgcaccagtgcaggctgcct

SEQ ID NO: 5207 - DNA, 30 bp, Artificial Sequence
  Synthetic
agaattcaccgcaccagtgcaggctgccta

SEQ ID NO: 5208 - DNA, 18 bp, Artificial Sequence
  Synthetic
tggtgcggtgaattcttt

SEQ ID NO: 5209 - DNA, 27 bp, Artificial Sequence
  Synthetic
aaagaattcaccgcaccagtgcaggct

SEQ ID NO: 5210 - DNA, 28 bp, Artificial Sequence
  Synthetic
aaagaattcaccgcaccagtgcaggctg

SEQ ID NO: 5211 - DNA, 29 bp, Artificial Sequence
  Synthetic
aaagaattcaccgcaccagtgcaggctgc

SEQ ID NO: 5212 - DNA, 30 bp, Artificial Sequence
  Synthetic
aaagaattcaccgcaccagtgcaggctgcc

SEQ ID NO: 5213 - DNA, 31 bp, Artificial Sequence
  Synthetic
aaagaattcaccgcaccagtgcaggctgcct

SEQ ID NO: 5214 - DNA, 32 bp, Artificial Sequence
  Synthetic
aaagaattcaccgcaccagtgcaggctgccta

SEQ ID NO: 5215 - DNA, 20 bp, Artificial Sequence
  Synthetic
tggtgcggtgaattctttgc

SEQ ID NO: 5216 - DNA, 29 bp, Artificial Sequence
  Synthetic
gcaaagaattcaccgcaccagtgcaggct

SEQ ID NO: 5217 - DNA, 30 bp, Artificial Sequence
  Synthetic
gcaaagaattcaccgcaccagtgcaggctg

SEQ ID NO: 5218 - DNA, 31 bp, Artificial Sequence
  Synthetic
gcaaagaattcaccgcaccagtgcaggctgc

SEQ ID NO: 5219 - DNA, 32 bp, Artificial Sequence
  Synthetic
gcaaagaattcaccgcaccagtgcaggctgcc

SEQ ID NO: 5220 - DNA, 33 bp, Artificial Sequence
  Synthetic
gcaaagaattcaccgcaccagtgcaggctgcct

SEQ ID NO: 5221 - DNA, 34 bp, Artificial Sequence
  Synthetic
gcaaagaattcaccgcaccagtgcaggctgccta

SEQ ID NO: 5222 - DNA, 8 bp, Artificial Sequence
  Synthetic
gcctgcac

SEQ ID NO: 5223 - DNA, 13 bp, Artificial Sequence
  Synthetic
tggtgcggtgaat

SEQ ID NO: 5224 - DNA, 21 bp, Artificial Sequence
  Synthetic
attcaccgcaccagtgcaggc

SEQ ID NO: 5225 - DNA, 22 bp, Artificial Sequence
  Synthetic
attcaccgcaccagtgcaggct

SEQ ID NO: 5226 - DNA, 22 bp, Artificial Sequence
  Synthetic
aattcaccgcaccagtgcaggc

SEQ ID NO: 5227 - DNA, 23 bp, Artificial Sequence
  Synthetic
gaattcaccgcaccagtgcaggc

SEQ ID NO: 5228 - DNA, 24 bp, Artificial Sequence
  Synthetic
agaattcaccgcaccagtgcaggc

SEQ ID NO: 5229 - DNA, 84 bp, Artificial Sequence
  Synthetic
gttttagtactctgtaatgaaaattacagaatctactaaaacaaggcaaaatgccgtgtttatctcggcatcttgatgtcgaga

SEQ ID NO: 5230 - DNA, 20 bp, Artificial Sequence
  Synthetic
ggcccagactgagcacgtga

SEQ ID NO: 5231 - DNA, 76 bp, Artificial Sequence
  Synthetic
gttttagagctagaaatagcaagttaaaataaggctagtccgttatcaacttgaaaaagtgggaccgagtcggtcc

SEQ ID NO: 5232 - DNA, 13 bp, Artificial Sequence
  Synthetic
cagactgagcacg

SEQ ID NO: 5233 - DNA, 10 bp, Artificial Sequence
  Synthetic
tgattgcaga

SEQ ID NO: 5234 - DNA, 23 bp, Artificial Sequence
  Synthetic
tctgcaatcacgtgctcagtctg

SEQ ID NO: 5235 - DNA, 20 bp, Artificial Sequence
  Synthetic
gtcaaccagtatcccggtgc

SEQ ID NO: 5236 - DNA, 20 bp, Artificial Sequence
  Synthetic
gagtccgagcagaagaagaa

SEQ ID NO: 5237 - DNA, 76 bp, Artificial Sequence
  Synthetic
gttttagagctagaaatagcaagttaaaataaggctagtccgttatcaacttgaaaaagtggcaccgagtcggtgc

SEQ ID NO: 5238 - DNA, 14 bp, Artificial Sequence
  Synthetic
tccgagcagaagaa

SEQ ID NO: 5239 - DNA, 16 bp, Artificial Sequence
  Synthetic
gaagtgctcccatcac

SEQ ID NO: 5240 - DNA, 30 bp, Artificial Sequence
  Synthetic
gtgatgggagcacttcttcttctgctcgga

SEQ ID NO: 5241 - DNA, 20 bp, Artificial Sequence
  Synthetic
gccgtttgtactttgtcctc

SEQ ID NO: 5242 - DNA, 20 bp, Artificial Sequence
  Synthetic
gcattttcaggaggaagcga

SEQ ID NO: 5243 - DNA, 15 bp, Artificial Sequence
  Synthetic
attttcaggaggaag

SEQ ID NO: 5244 - DNA, 15 bp, Artificial Sequence
  Synthetic
cgctggcttcagaca

SEQ ID NO: 5245 - DNA, 30 bp, Artificial Sequence
  Synthetic
tgtctgaagccagcgcttcctcctgaaaat

SEQ ID NO: 5246 - DNA, 21 bp, Artificial Sequence
  Synthetic
gatgaagcactgtgggtacga

SEQ ID NO: 5247 - DNA, 10 bp, Artificial Sequence
  Synthetic
agatggcaga

SEQ ID NO: 5248 - DNA, 23 bp, Artificial Sequence
  Synthetic
tctgccatctcgtgctcagtctg

SEQ ID NO: 5249 - DNA, 16 bp, Artificial Sequence
  Synthetic
gaagagctcccatcac

SEQ ID NO: 5250 - DNA, 30 bp, Artificial Sequence
  Synthetic
gtgatgggagctcttcttcttctgctcgga

SEQ ID NO: 5251 - DNA, 20 bp, Artificial Sequence
  Synthetic
gtcatcttagtcattacctg

SEQ ID NO: 5252 - DNA, 15 bp, Artificial Sequence
  Synthetic
catcttagtcattac

SEQ ID NO: 5253 - DNA, 14 bp, Artificial Sequence
  Synthetic
ttgaggtgttcgtt

SEQ ID NO: 5254 - DNA, 29 bp, Artificial Sequence
  Synthetic
aacgaacacctcaagtaatgactaagatg

SEQ ID NO: 5255 - DNA, 20 bp, Artificial Sequence
  Synthetic
ggaatcccttctgcagcacc

SEQ ID NO: 5256 - DNA, 14 bp, Artificial Sequence
  Synthetic
atcccttctgcagc

SEQ ID NO: 5257 - DNA, 17 bp, Artificial Sequence
  Synthetic
accaggatcgcttttcc

SEQ ID NO: 5258 - DNA, 31 bp, Artificial Sequence
  Synthetic
ggaaaagcgatcctggtgctgcagaagggat

SEQ ID NO: 5259 - DNA, 15 bp, Artificial Sequence
  Synthetic
cgattgcttcagaca

SEQ ID NO: 5260 - DNA, 30 bp, Artificial Sequence
  Synthetic
tgtctgaagcaatcgcttcctcctgaaaat

SEQ ID NO: 5261 - DNA, 20 bp, Artificial Sequence
  Synthetic
gattcctggtgccagaaaca

SEQ ID NO: 5262 - DNA, 13 bp, Artificial Sequence
  Synthetic
cctggtgccagaa

SEQ ID NO: 5263 - DNA, 19 bp, Artificial Sequence
  Synthetic
acaggggcgacgggagggc

SEQ ID NO: 5264 - DNA, 32 bp, Artificial Sequence
  Synthetic
gccctcccgtcgcccctgtttctggcaccagg

SEQ ID NO: 5265 - DNA, 20 bp, Artificial Sequence
  Synthetic
gatgtctgcaggccagatga

SEQ ID NO: 5266 - DNA, 13 bp, Artificial Sequence
  Synthetic
tctgcaggccaga

SEQ ID NO: 5267 - DNA, 22 bp, Artificial Sequence
  Synthetic
tgtgggctccagatggcacatt

SEQ ID NO: 5268 - DNA, 35 bp, Artificial Sequence
  Synthetic
aatgtgccatctggagcccacatctggcctgcaga

SEQ ID NO: 5269 - DNA, 21 bp, Artificial Sequence
  Synthetic
gtcaaccattaagcaaaacat

SEQ ID NO: 5270 - DNA, 21 bp, Artificial Sequence
  Synthetic
gcccttcagctaaaataaagg

SEQ ID NO: 5271 - DNA, 21 bp, Artificial Sequence
  Synthetic
gatgtacagagagcccagggc

SEQ ID NO: 5272 - DNA, 21 bp, Artificial Sequence
  Synthetic
gcgggctggagctgttcgcgc

SEQ ID NO: 5273 - DNA, 13 bp, Artificial Sequence
  Synthetic
ctggagctgttcg

SEQ ID NO: 5274 - DNA, 15 bp, Artificial Sequence
  Synthetic
cgcttgcatcttgca

SEQ ID NO: 5275 - DNA, 28 bp, Artificial Sequence
  Synthetic
tgcaagatgcaagcgcgaacagctccag

SEQ ID NO: 5276 - DNA, 21 bp, Artificial Sequence
  Synthetic
gccgcgcgcgcgaaaaagccg

SEQ ID NO: 5277 - DNA, 20 bp, Artificial Sequence
  Synthetic
gcggtagctcccagaacggt

SEQ ID NO: 5278 - DNA, 13 bp, Artificial Sequence
  Synthetic
tagctcccagaac

SEQ ID NO: 5279 - DNA, 10 bp, Artificial Sequence
  Synthetic
ggtgagcatc

SEQ ID NO: 5280 - DNA, 23 bp, Artificial Sequence
  Synthetic
gatgctcaccgttctgggagcta

SEQ ID NO: 5281 - DNA, 21 bp, Artificial Sequence
  Synthetic
gaccatcagtatgagcagcat

SEQ ID NO: 5282 - DNA, 21 bp, Artificial Sequence
  Synthetic
gtgacttccatggttccacaa

SEQ ID NO: 5283 - DNA, 13 bp, Artificial Sequence
  Synthetic
ttccatggttcca

SEQ ID NO: 5284 - DNA, 13 bp, Artificial Sequence
  Synthetic
ccatgggtccatt

SEQ ID NO: 5285 - DNA, 26 bp, Artificial Sequence
  Synthetic
aatggacccatggtggaaccatggaa

SEQ ID NO: 5286 - DNA, 20 bp, Artificial Sequence
  Synthetic
gcctgagcaggccacgaaca

SEQ ID NO: 5287 - DNA, 21 bp, Artificial Sequence
  Synthetic
gagggttgcccttgccactca

SEQ ID NO: 5288 - DNA, 13 bp, Artificial Sequence
  Synthetic
ttgcccttgccac

SEQ ID NO: 5289 - DNA, 13 bp, Artificial Sequence
  Synthetic
tcaggaaaggagc

SEQ ID NO: 5290 - DNA, 26 bp, Artificial Sequence
  Synthetic
gctcctttcctgagtggcaagggcaa

SEQ ID NO: 5291 - DNA, 20 bp, Artificial Sequence
  Synthetic
gaaaagctgctgtcagccac

SEQ ID NO: 5292 - DNA, 17 bp, Artificial Sequence
  Synthetic
acctggctcgcttttcc

SEQ ID NO: 5293 - DNA, 31 bp, Artificial Sequence
  Synthetic
ggaaaagcgagccaggtgctgcagaagggat

SEQ ID NO: 5294 - DNA, 20 bp, Artificial Sequence
  Synthetic
gaagctcggaaaagcgagcc

SEQ ID NO: 5295 - DNA, 20 bp, Artificial Sequence
  Synthetic
ggcactgcggctggaggtgg

SEQ ID NO: 5296 - DNA, 9 bp, Artificial Sequence
  Synthetic
ggctggagg

SEQ ID NO: 5297 - DNA, 10 bp, Artificial Sequence
  Synthetic
ttggggttaa

SEQ ID NO: 5298 - DNA, 19 bp, Artificial Sequence
  Synthetic
ttaaccccaacctccagcc

SEQ ID NO: 5299 - DNA, 21 bp, Artificial Sequence
  Synthetic
gtcccttccttccacccagcc

SEQ ID NO: 5300 - DNA, 21 bp, Artificial Sequence
  Synthetic
gccctgcctgtcatcctgctt

SEQ ID NO: 5301 - DNA, 20 bp, Artificial Sequence
  Synthetic
gcagtgccaccggggcgccg

SEQ ID NO: 5302 - DNA, 20 bp, Artificial Sequence
  Synthetic
gcgggggctcagagagggca

SEQ ID NO: 5303 - DNA, 19 bp, Artificial Sequence
  Synthetic
gacacacacacaggcctgg

SEQ ID NO: 5304 - DNA, 17 bp, Artificial Sequence
  Synthetic
gcctggatcgcttttcc

SEQ ID NO: 5305 - DNA, 31 bp, Artificial Sequence
  Synthetic
ggaaaagcgatccaggcgctgcagaagggat

SEQ ID NO: 5306 - DNA, 17 bp, Artificial Sequence
  Synthetic
tcctggatcgcttttcc

SEQ ID NO: 5307 - DNA, 31 bp, Artificial Sequence
  Synthetic
ggaaaagcgatccaggagctgcagaagggat

SEQ ID NO: 5308 - DNA, 17 bp, Artificial Sequence
  Synthetic
aactggatcgcttttcc

SEQ ID NO: 5309 - DNA, 31 bp, Artificial Sequence
  Synthetic
ggaaaagcgatccagttgctgcagaagggat

SEQ ID NO: 5310 - DNA, 17 bp, Artificial Sequence
  Synthetic
acgtggatcgcttttcc

SEQ ID NO: 5311 - DNA, 31 bp, Artificial Sequence
  Synthetic
ggaaaagcgatccacgtgctgcagaagggat

SEQ ID NO: 5312 - DNA, 17 bp, Artificial Sequence
  Synthetic
acttggatcgcttttcc

SEQ ID NO: 5313 - DNA, 31 bp, Artificial Sequence
  Synthetic
ggaaaagcgatccaagtgctgcagaagggat

SEQ ID NO: 5314 - DNA, 17 bp, Artificial Sequence
  Synthetic
accgggatcgcttttcc

SEQ ID NO: 5315 - DNA, 31 bp, Artificial Sequence
  Synthetic
ggaaaagcgatcccggtgctgcagaagggat

SEQ ID NO: 5316 - DNA, 17 bp, Artificial Sequence
  Synthetic
acctagatcgcttttcc

SEQ ID NO: 5317 - DNA, 31 bp, Artificial Sequence
  Synthetic
ggaaaagcgatctaggtgctgcagaagggat

SEQ ID NO: 5318 - DNA, 17 bp, Artificial Sequence
  Synthetic
acctgcatcgcttttcc

SEQ ID NO: 5319 - DNA, 31 bp, Artificial Sequence
  Synthetic
ggaaaagcgatgcaggtgctgcagaagggat

SEQ ID NO: 5320 - DNA, 17 bp, Artificial Sequence
  Synthetic
acctggaccgcttttcc

SEQ ID NO: 5321 - DNA, 31 bp, Artificial Sequence
  Synthetic
ggaaaagcggtccaggtgctgcagaagggat

SEQ ID NO: 5322 - DNA, 17 bp, Artificial Sequence
  Synthetic
acctggatctcttttcc

SEQ ID NO: 5323 - DNA, 31 bp, Artificial Sequence
  Synthetic
ggaaaagagatccaggtgctgcagaagggat

SEQ ID NO: 5324 - DNA, 10 bp, Artificial Sequence
  Synthetic
cgatggcaga

SEQ ID NO: 5325 - DNA, 23 bp, Artificial Sequence
  Synthetic
tctgccatcgcgtgctcagtctg

SEQ ID NO: 5326 - DNA, 10 bp, Artificial Sequence
  Synthetic
ggatggcaga

SEQ ID NO: 5327 - DNA, 23 bp, Artificial Sequence
  Synthetic
tctgccatcccgtgctcagtctg

SEQ ID NO: 5328 - DNA, 10 bp, Artificial Sequence
  Synthetic
tgctggcaga

SEQ ID NO: 5329 - DNA, 23 bp, Artificial Sequence
  Synthetic
tctgccagcacgtgctcagtctg

SEQ ID NO: 5330 - DNA, 10 bp, Artificial Sequence
  Synthetic
tggtggcaga

SEQ ID NO: 5331 - DNA, 23 bp, Artificial Sequence
  Synthetic
tctgccaccacgtgctcagtctg

SEQ ID NO: 5332 - DNA, 10 bp, Artificial Sequence
  Synthetic
tgttggcaga

SEQ ID NO: 5333 - DNA, 23 bp, Artificial Sequence
  Synthetic
tctgccaacacgtgctcagtctg

SEQ ID NO: 5334 - DNA, 10 bp, Artificial Sequence
  Synthetic
tgatagcaga

SEQ ID NO: 5335 - DNA, 23 bp, Artificial Sequence
  Synthetic
tctgctatcacgtgctcagtctg

SEQ ID NO: 5336 - DNA, 10 bp, Artificial Sequence
  Synthetic
tgatcgcaga

SEQ ID NO: 5337 - DNA, 23 bp, Artificial Sequence
  Synthetic
tctgcgatcacgtgctcagtctg

SEQ ID NO: 5338 - DNA, 10 bp, Artificial Sequence
  Synthetic
tgatggaaga

SEQ ID NO: 5339 - DNA, 23 bp, Artificial Sequence
  Synthetic
tcttccatcacgtgctcagtctg

SEQ ID NO: 5340 - DNA, 10 bp, Artificial Sequence
  Synthetic
tgatgggaga

SEQ ID NO: 5341 - DNA, 23 bp, Artificial Sequence
  Synthetic
tctcccatcacgtgctcagtctg

SEQ ID NO: 5342 - DNA, 10 bp, Artificial Sequence
  Synthetic
tgatggtaga

SEQ ID NO: 5343 - DNA, 23 bp, Artificial Sequence
  Synthetic
tctaccatcacgtgctcagtctg

SEQ ID NO: 5344 - DNA, 16 bp, Artificial Sequence
  Synthetic
gcagggctcccatcac

SEQ ID NO: 5345 - DNA, 30 bp, Artificial Sequence
  Synthetic
gtgatgggagccctgcttcttctgctcgga

SEQ ID NO: 5346 - DNA, 16 bp, Artificial Sequence
  Synthetic
gtagggctcccatcac

SEQ ID NO: 5347 - DNA, 30 bp, Artificial Sequence
  Synthetic
gtgatgggagccctacttcttctgctcgga

SEQ ID NO: 5348 - DNA, 16 bp, Artificial Sequence
  Synthetic
gaggggctcccatcac

SEQ ID NO: 5349 - DNA, 30 bp, Artificial Sequence
  Synthetic
gtgatgggagcccctcttcttctgctcgga

SEQ ID NO: 5350 - DNA, 16 bp, Artificial Sequence
  Synthetic
gaacggctcccatcac

SEQ ID NO: 5351 - DNA, 30 bp, Artificial Sequence
  Synthetic
gtgatgggagccgttcttcttctgctcgga

SEQ ID NO: 5352 - DNA, 16 bp, Artificial Sequence
  Synthetic
gaagggatcccatcac

SEQ ID NO: 5353 - DNA, 30 bp, Artificial Sequence
  Synthetic
gtgatgggatcccttcttcttctgctcgga

SEQ ID NO: 5354 - DNA, 16 bp, Artificial Sequence
  Synthetic
gaagggcacccatcac

SEQ ID NO: 5355 - DNA, 30 bp, Artificial Sequence
  Synthetic
gtgatgggtgcccttcttcttctgctcgga

SEQ ID NO: 5356 - DNA, 16 bp, Artificial Sequence
  Synthetic
gaagggcccccatcac

SEQ ID NO: 5357 - DNA, 30 bp, Artificial Sequence
  Synthetic
gtgatgggggcccttcttcttctgctcgga

SEQ ID NO: 5358 - DNA, 16 bp, Artificial Sequence
  Synthetic
gaagggcgcccatcac

SEQ ID NO: 5359 - DNA, 30 bp, Artificial Sequence
  Synthetic
gtgatgggcgcccttcttcttctgctcgga

SEQ ID NO: 5360 - DNA, 16 bp, Artificial Sequence
  Synthetic
gaagggctgccatcac

SEQ ID NO: 5361 - DNA, 30 bp, Artificial Sequence
  Synthetic
gtgatggcagcccttcttcttctgctcgga

SEQ ID NO: 5362 - DNA, 16 bp, Artificial Sequence
  Synthetic
gaagggcttccatcac

SEQ ID NO: 5363 - DNA, 30 bp, Artificial Sequence
  Synthetic
gtgatggaagcccttcttcttctgctcgga

SEQ ID NO: 5364 - DNA, 14 bp, Artificial Sequence
  Synthetic
atgaggtgttcgtt

SEQ ID NO: 5365 - DNA, 29 bp, Artificial Sequence
  Synthetic
aacgaacacctcatgtaatgactaagatg

SEQ ID NO: 5366 - DNA, 14 bp, Artificial Sequence
  Synthetic
gtgaggtgttcgtt

SEQ ID NO: 5367 - DNA, 29 bp, Artificial Sequence
  Synthetic
aacgaacacctcacgtaatgactaagatg

SEQ ID NO: 5368 - DNA, 14 bp, Artificial Sequence
  Synthetic
cagaggtgttcgtt

SEQ ID NO: 5369 - DNA, 29 bp, Artificial Sequence
  Synthetic
aacgaacacctctggtaatgactaagatg

SEQ ID NO: 5370 - DNA, 14 bp, Artificial Sequence
  Synthetic
cggaggtgttcgtt

SEQ ID NO: 5371 - DNA, 29 bp, Artificial Sequence
  Synthetic
aacgaacacctccggtaatgactaagatg

SEQ ID NO: 5372 - DNA, 14 bp, Artificial Sequence
  Synthetic
ctcaggtgttcgtt

SEQ ID NO: 5373 - DNA, 29 bp, Artificial Sequence
  Synthetic
aacgaacacctgaggtaatgactaagatg

SEQ ID NO: 5374 - DNA, 14 bp, Artificial Sequence
  Synthetic
ctgcggtgttcgtt

SEQ ID NO: 5375 - DNA, 29 bp, Artificial Sequence
  Synthetic
aacgaacaccgcaggtaatgactaagatg

SEQ ID NO: 5376 - DNA, 14 bp, Artificial Sequence
  Synthetic
ctggggtgttcgtt

SEQ ID NO: 5377 - DNA, 29 bp, Artificial Sequence
  Synthetic
aacgaacaccccaggtaatgactaagatg

SEQ ID NO: 5378 - DNA, 14 bp, Artificial Sequence
  Synthetic
ctgtggtgttcgtt

SEQ ID NO: 5379 - DNA, 29 bp, Artificial Sequence
  Synthetic
aacgaacaccacaggtaatgactaagatg

SEQ ID NO: 5380 - DNA, 14 bp, Artificial Sequence
  Synthetic
ctgatgtgttcgtt

SEQ ID NO: 5381 - DNA, 29 bp, Artificial Sequence
  Synthetic
aacgaacacatcaggtaatgactaagatg

SEQ ID NO: 5382 - DNA, 14 bp, Artificial Sequence
  Synthetic
ctgagatgttcgtt

SEQ ID NO: 5383 - DNA, 29 bp, Artificial Sequence
  Synthetic
aacgaacatctcaggtaatgactaagatg

SEQ ID NO: 5384 - DNA, 14 bp, Artificial Sequence
  Synthetic
ctgaggcgttcgtt

SEQ ID NO: 5385 - DNA, 29 bp, Artificial Sequence
  Synthetic
aacgaacgcctcaggtaatgactaagatg

SEQ ID NO: 5386 - DNA, 15 bp, Artificial Sequence
  Synthetic
agatggcttcagaca

SEQ ID NO: 5387 - DNA, 30 bp, Artificial Sequence
  Synthetic
tgtctgaagccatctcttcctcctgaaaat

SEQ ID NO: 5388 - DNA, 15 bp, Artificial Sequence
  Synthetic
ggatggcttcagaca

SEQ ID NO: 5389 - DNA, 30 bp, Artificial Sequence
  Synthetic
tgtctgaagccatcccttcctcctgaaaat

SEQ ID NO: 5390 - DNA, 15 bp, Artificial Sequence
  Synthetic
tgatggcttcagaca

SEQ ID NO: 5391 - DNA, 30 bp, Artificial Sequence
  Synthetic
tgtctgaagccatcacttcctcctgaaaat

SEQ ID NO: 5392 - DNA, 15 bp, Artificial Sequence
  Synthetic
caatggcttcagaca

SEQ ID NO: 5393 - DNA, 30 bp, Artificial Sequence
  Synthetic
tgtctgaagccattgcttcctcctgaaaat

SEQ ID NO: 5394 - DNA, 15 bp, Artificial Sequence
  Synthetic
cggtggcttcagaca

SEQ ID NO: 5395 - DNA, 30 bp, Artificial Sequence
  Synthetic
tgtctgaagccaccgcttcctcctgaaaat

SEQ ID NO: 5396 - DNA, 15 bp, Artificial Sequence
  Synthetic
cgttggcttcagaca

SEQ ID NO: 5397 - DNA, 30 bp, Artificial Sequence
  Synthetic
tgtctgaagccaacgcttcctcctgaaaat

SEQ ID NO: 5398 - DNA, 15 bp, Artificial Sequence
  Synthetic
cgaaggcttcagaca

SEQ ID NO: 5399 - DNA, 30 bp, Artificial Sequence
  Synthetic
tgtctgaagccttcgcttcctcctgaaaat

SEQ ID NO: 5400 - DNA, 15 bp, Artificial Sequence
  Synthetic
cgacggcttcagaca

SEQ ID NO: 5401 - DNA, 30 bp, Artificial Sequence
  Synthetic
tgtctgaagccgtcgcttcctcctgaaaat

SEQ ID NO: 5402 - DNA, 15 bp, Artificial Sequence
  Synthetic
cgagggcttcagaca

SEQ ID NO: 5403 - DNA, 30 bp, Artificial Sequence
  Synthetic
tgtctgaagccctcgcttcctcctgaaaat

SEQ ID NO: 5404 - DNA, 15 bp, Artificial Sequence
  Synthetic
cgatgccttcagaca

SEQ ID NO: 5405 - DNA, 30 bp, Artificial Sequence
  Synthetic
tgtctgaaggcatcgcttcctcctgaaaat

SEQ ID NO: 5406 - DNA, 11 bp, Artificial Sequence
  Synthetic
ccaggggtgac

SEQ ID NO: 5407 - DNA, 24 bp, Artificial Sequence
  Synthetic
gtcacccctggttctggcaccagg

SEQ ID NO: 5408 - DNA, 11 bp, Artificial Sequence
  Synthetic
gcaggggtgac

SEQ ID NO: 5409 - DNA, 24 bp, Artificial Sequence
  Synthetic
gtcacccctgcttctggcaccagg

SEQ ID NO: 5410 - DNA, 11 bp, Artificial Sequence
  Synthetic
aaaggggtgac

SEQ ID NO: 5411 - DNA, 24 bp, Artificial Sequence
  Synthetic
gtcacccctttttctggcaccagg

SEQ ID NO: 5412 - DNA, 11 bp, Artificial Sequence
  Synthetic
agaggggtgac

SEQ ID NO: 5413 - DNA, 24 bp, Artificial Sequence
  Synthetic
gtcacccctctttctggcaccagg

SEQ ID NO: 5414 - DNA, 11 bp, Artificial Sequence
  Synthetic
ataggggtgac

SEQ ID NO: 5415 - DNA, 24 bp, Artificial Sequence
  Synthetic
gtcacccctatttctggcaccagg

SEQ ID NO: 5416 - DNA, 11 bp, Artificial Sequence
  Synthetic
actggggtgac

SEQ ID NO: 5417 - DNA, 24 bp, Artificial Sequence
  Synthetic
gtcaccccagtttctggcaccagg

SEQ ID NO: 5418 - DNA, 11 bp, Artificial Sequence
  Synthetic
acaagggtgac

SEQ ID NO: 5419 - DNA, 24 bp, Artificial Sequence
  Synthetic
gtcacccttgtttctggcaccagg

SEQ ID NO: 5420 - DNA, 11 bp, Artificial Sequence
  Synthetic
acagtggtgac

SEQ ID NO: 5421 - DNA, 24 bp, Artificial Sequence
  Synthetic
gtcaccactgtttctggcaccagg

SEQ ID NO: 5422 - DNA, 11 bp, Artificial Sequence
  Synthetic
acaggcgtgac

SEQ ID NO: 5423 - DNA, 24 bp, Artificial Sequence
  Synthetic
gtcacgcctgtttctggcaccagg

SEQ ID NO: 5424 - DNA, 19 bp, Artificial Sequence
  Synthetic
acaggggagacgggagggc

SEQ ID NO: 5425 - DNA, 32 bp, Artificial Sequence
  Synthetic
gccctcccgtctcccctgtttctggcaccagg

SEQ ID NO: 5426 - DNA, 19 bp, Artificial Sequence
  Synthetic
acaggggggacgggagggc

SEQ ID NO: 5427 - DNA, 32 bp, Artificial Sequence
  Synthetic
gccctcccgtcccccctgtttctggcaccagg

SEQ ID NO: 5428 - DNA, 22 bp, Artificial Sequence
  Synthetic
agagggctccagatggcacatt

SEQ ID NO: 5429 - DNA, 35 bp, Artificial Sequence
  Synthetic
aatgtgccatctggagccctcttctggcctgcaga

SEQ ID NO: 5430 - DNA, 22 bp, Artificial Sequence
  Synthetic
cgagggctccagatggcacatt

SEQ ID NO: 5431 - DNA, 35 bp, Artificial Sequence
  Synthetic
aatgtgccatctggagccctcgtctggcctgcaga

SEQ ID NO: 5432 - DNA, 22 bp, Artificial Sequence
  Synthetic
ggagggctccagatggcacatt

SEQ ID NO: 5433 - DNA, 35 bp, Artificial Sequence
  Synthetic
aatgtgccatctggagccctcctctggcctgcaga

SEQ ID NO: 5434 - DNA, 22 bp, Artificial Sequence
  Synthetic
taagggctccagatggcacatt

SEQ ID NO: 5435 - DNA, 35 bp, Artificial Sequence
  Synthetic
aatgtgccatctggagcccttatctggcctgcaga

SEQ ID NO: 5436 - DNA, 22 bp, Artificial Sequence
  Synthetic
tgcgggctccagatggcacatt

SEQ ID NO: 5437 - DNA, 35 bp, Artificial Sequence
  Synthetic
aatgtgccatctggagcccgcatctggcctgcaga

SEQ ID NO: 5438 - DNA, 22 bp, Artificial Sequence
  Synthetic
tgggggctccagatggcacatt

SEQ ID NO: 5439 - DNA, 35 bp, Artificial Sequence
  Synthetic
aatgtgccatctggagcccccatctggcctgcaga

SEQ ID NO: 5440 - DNA, 22 bp, Artificial Sequence
  Synthetic
tgagtgctccagatggcacatt

SEQ ID NO: 5441 - DNA, 35 bp, Artificial Sequence
  Synthetic
aatgtgccatctggagcactcatctggcctgcaga

SEQ ID NO: 5442 - DNA, 22 bp, Artificial Sequence
  Synthetic
tgaggcctccagatggcacatt

SEQ ID NO: 5443 - DNA, 35 bp, Artificial Sequence
  Synthetic
aatgtgccatctggaggcctcatctggcctgcaga

SEQ ID NO: 5444 - DNA, 22 bp, Artificial Sequence
  Synthetic
tgagggatccagatggcacatt

SEQ ID NO: 5445 - DNA, 35 bp, Artificial Sequence
  Synthetic
aatgtgccatctggatccctcatctggcctgcaga

SEQ ID NO: 5446 - DNA, 22 bp, Artificial Sequence
  Synthetic
tgagggttccagatggcacatt

SEQ ID NO: 5447 - DNA, 35 bp, Artificial Sequence
  Synthetic
aatgtgccatctggaaccctcatctggcctgcaga

SEQ ID NO: 5448 - DNA, 22 bp, Artificial Sequence
  Synthetic
tgagggctgcagatggcacatt

SEQ ID NO: 5449 - DNA, 35 bp, Artificial Sequence
  Synthetic
aatgtgccatctgcagccctcatctggcctgcaga

SEQ ID NO: 5450 - DNA, 15 bp, Artificial Sequence
  Synthetic
tggtgaggtgaattc

SEQ ID NO: 5451 - DNA, 24 bp, Artificial Sequence
  Synthetic
gaattcacctcaccagtgcaggct

SEQ ID NO: 5452 - DNA, 15 bp, Artificial Sequence
  Synthetic
tggtgtggtgaattc

SEQ ID NO: 5453 - DNA, 24 bp, Artificial Sequence
  Synthetic
gaattcaccacaccagtgcaggct

SEQ ID NO: 5454 - DNA, 11 bp, Artificial Sequence
  Synthetic
atgatggcaga

SEQ ID NO: 5455 - DNA, 24 bp, Artificial Sequence
  Synthetic
tctgccatcatcgtgctcagtctg

SEQ ID NO: 5456 - DNA, 13 bp, Artificial Sequence
  Synthetic
ctttgatggcaga

SEQ ID NO: 5457 - DNA, 26 bp, Artificial Sequence
  Synthetic
tctgccatcaaagcgtgctcagtctg

SEQ ID NO: 5458 - DNA, 9 bp, Artificial Sequence
  Synthetic
gatggcaga

SEQ ID NO: 5459 - DNA, 22 bp, Artificial Sequence
  Synthetic
tctgccatccgtgctcagtctg

SEQ ID NO: 5460 - DNA, 31 bp, Artificial Sequence
  Synthetic
tggcagaggaaaggaagccctgcttcctcca

SEQ ID NO: 5461 - DNA, 44 bp, Artificial Sequence
  Synthetic
tggaggaagcagggcttcctttcctctgccacgtgctcagtctg

SEQ ID NO: 5462 - DNA, 17 bp, Artificial Sequence
  Synthetic
gaaggtgctcccatcac

SEQ ID NO: 5463 - DNA, 31 bp, Artificial Sequence
  Synthetic
gtgatgggagcaccttcttcttctgctcgga

SEQ ID NO: 5464 - DNA, 19 bp, Artificial Sequence
  Synthetic
tgcgaagggctcccatcac

SEQ ID NO: 5465 - DNA, 33 bp, Artificial Sequence
  Synthetic
gtgatgggagcccttcgcattcttctgctcgga

SEQ ID NO: 5466 - DNA, 15 bp, Artificial Sequence
  Synthetic
gaaggctcccatcac

SEQ ID NO: 5467 - DNA, 29 bp, Artificial Sequence
  Synthetic
gtgatgggagccttcttcttctgctcgga

SEQ ID NO: 5468 - DNA, 13 bp, Artificial Sequence
  Synthetic
gaactcccatcac

SEQ ID NO: 5469 - DNA, 27 bp, Artificial Sequence
  Synthetic
gtgatgggagttcttcttctgctcgga

SEQ ID NO: 5470 - DNA, 18 bp, Artificial Sequence
  Synthetic
accctggatcgcttttcc

SEQ ID NO: 5471 - DNA, 32 bp, Artificial Sequence
  Synthetic
ggaaaagcgatccagggtgctgcagaagggat

SEQ ID NO: 5472 - DNA, 20 bp, Artificial Sequence
  Synthetic
accgattggatcgcttttcc

SEQ ID NO: 5473 - DNA, 34 bp, Artificial Sequence
  Synthetic
ggaaaagcgatccaatcggtgctgcagaagggat

SEQ ID NO: 5474 - DNA, 16 bp, Artificial Sequence
  Synthetic
acctgatcgcttttcc

SEQ ID NO: 5475 - DNA, 30 bp, Artificial Sequence
  Synthetic
ggaaaagcgatcaggtgctgcagaagggat

SEQ ID NO: 5476 - DNA, 14 bp, Artificial Sequence
  Synthetic
accttcgcttttcc

SEQ ID NO: 5477 - DNA, 28 bp, Artificial Sequence
  Synthetic
ggaaaagcgaaggtgctgcagaagggat

SEQ ID NO: 5478 - DNA, 27 bp, Artificial Sequence
  Synthetic
cctggatcgcttttccgagcttctggc

SEQ ID NO: 5479 - DNA, 41 bp, Artificial Sequence
  Synthetic
gccagaagctcggaaaagcgatccagggctgcagaagggat

SEQ ID NO: 5480 - DNA, 25 bp, Artificial Sequence
  Synthetic
tggatcgcttttccgagcttctggc

SEQ ID NO: 5481 - DNA, 39 bp, Artificial Sequence
  Synthetic
gccagaagctcggaaaagcgatccagctgcagaagggat

SEQ ID NO: 5482 - DNA, 27 bp, Artificial Sequence
  Synthetic
atcgcttttccgagcttctggcggtct

SEQ ID NO: 5483 - DNA, 41 bp, Artificial Sequence
  Synthetic
agaccgccagaagctcggaaaagcgatgctgcagaagggat

SEQ ID NO: 5484 - DNA, 26 bp, Artificial Sequence
  Synthetic
cttttccgagcttctggcggtctcaa

SEQ ID NO: 5485 - DNA, 40 bp, Artificial Sequence
  Synthetic
ttgagaccgccagaagctcggaaaaggctgcagaagggat

SEQ ID NO: 5486 - DNA, 27 bp, Artificial Sequence
  Synthetic
ccgagcttctggcggtctcaagcacta

SEQ ID NO: 5487 - DNA, 41 bp, Artificial Sequence
  Synthetic
tagtgcttgagaccgccagaagctcgggctgcagaagggat

SEQ ID NO: 5488 - DNA, 27 bp, Artificial Sequence
  Synthetic
cttctggcggtctcaagcactacctac

SEQ ID NO: 5489 - DNA, 41 bp, Artificial Sequence
  Synthetic
gtaggtagtgcttgagaccgccagaaggctgcagaagggat

SEQ ID NO: 5490 - DNA, 34 bp, Artificial Sequence
  Synthetic
caccatacctggatcgcttttccgagcttctggc

SEQ ID NO: 5491 - DNA, 48 bp, Artificial Sequence
  Synthetic
gccagaagctcggaaaagcgatccaggtatggtggctgcagaagggat

SEQ ID NO: 5492 - DNA, 38 bp, Artificial Sequence
  Synthetic
caccatcatcacctggatcgcttttccgagcttctggc

SEQ ID NO: 5493 - DNA, 52 bp, Artificial Sequence
  Synthetic
gccagaagctcggaaaagcgatccaggtgatgatggtggctgcagaagggat

SEQ ID NO: 5494 - DNA, 43 bp, Artificial Sequence
  Synthetic
caccatcatcaccatacctggatcgcttttccgagcttctggc

SEQ ID NO: 5495 - DNA, 57 bp, Artificial Sequence
  Synthetic
gccagaagctcggaaaagcgatccaggtatggtgatgatggtggctgcagaagggat

SEQ ID NO: 5496 - DNA, 48 bp, Artificial Sequence
  Synthetic
caccatcatcaccatcattaacctggatcgcttttccgagcttctggc

SEQ ID NO: 5497 - DNA, 62 bp, Artificial Sequence
  Synthetic
gccagaagctcggaaaagcgatccaggttaatgatggtgatgatggtggctgcagaagggat

SEQ ID NO: 5498 - DNA, 23 bp, Artificial Sequence
  Synthetic
gatggcagaggaaaggaagccct

SEQ ID NO: 5499 - DNA, 36 bp, Artificial Sequence
  Synthetic
agggcttcctttcctctgccatccgtgctcagtctg

SEQ ID NO: 5500 - DNA, 23 bp, Artificial Sequence
  Synthetic
cagaggaaaggaagccctgcttc

SEQ ID NO: 5501 - DNA, 36 bp, Artificial Sequence
  Synthetic
gaagcagggcttcctttcctctgcgtgctcagtctg

SEQ ID NO: 5502 - DNA, 23 bp, Artificial Sequence
  Synthetic
ggaaaggaagccctgcttcctcc

SEQ ID NO: 5503 - DNA, 36 bp, Artificial Sequence
  Synthetic
ggaggaagcagggcttcctttcccgtgctcagtctg

SEQ ID NO: 5504 - DNA, 21 bp, Artificial Sequence
  Synthetic
ggaagccctgcttcctccaga

SEQ ID NO: 5505 - DNA, 34 bp, Artificial Sequence
  Synthetic
tctggaggaagcagggcttcccgtgctcagtctg

SEQ ID NO: 5506 - DNA, 23 bp, Artificial Sequence
  Synthetic
ccctgcttcctccagagggcgtc

SEQ ID NO: 5507 - DNA, 36 bp, Artificial Sequence
  Synthetic
gacgccctctggaggaagcagggcgtgctcagtctg

SEQ ID NO: 5508 - DNA, 35 bp, Artificial Sequence
  Synthetic
gtgatggcagaggaaaggaagccctgcttcctcca

SEQ ID NO: 5509 - DNA, 48 bp, Artificial Sequence
  Synthetic
tggaggaagcagggcttcctttcctctgccatcaccgtgctcagtctg

SEQ ID NO: 5510 - DNA, 37 bp, Artificial Sequence
  Synthetic
gattgatggcagaggaaaggaagccctgcttcctcca

SEQ ID NO: 5511 - DNA, 50 bp, Artificial Sequence
  Synthetic
tggaggaagcagggcttcctttcctctgccatcaatccgtgctcagtctg

SEQ ID NO: 5512 - DNA, 40 bp, Artificial Sequence
  Synthetic
gattactgatggcagaggaaaggaagccctgcttcctcca

SEQ ID NO: 5513 - DNA, 53 bp, Artificial Sequence
  Synthetic
tggaggaagcagggcttcctttcctctgccatcagtaatccgtgctcagtctg

SEQ ID NO: 5514 - DNA, 44 bp, Artificial Sequence
  Synthetic
gattacaaggtgatggcagaggaaaggaagccctgcttcctcca

SEQ ID NO: 5515 - DNA, 57 bp, Artificial Sequence
  Synthetic
tggaggaagcagggcttcctttcctctgccatcaccttgtaatccgtgctcagtctg

SEQ ID NO: 5516 - DNA, 49 bp, Artificial Sequence
  Synthetic
gattacaaggatgactgatggcagaggaaaggaagccctgcttcctcca

SEQ ID NO: 5517 - DNA, 62 bp, Artificial Sequence
  Synthetic
tggaggaagcagggcttcctttcctctgccatcagtcatccttgtaatccgtgctcagtctg

SEQ ID NO: 5518 - DNA, 54 bp, Artificial Sequence
  Synthetic
gattacaaggatgacgacgatgatggcagaggaaaggaagccctgcttcctcca

SEQ ID NO: 5519 - DNA, 67 bp, Artificial Sequence
  Synthetic
tggaggaagcagggcttcctttcctctgccatcatcgtcgtcatccttgtaatccgtgctcagtctg

SEQ ID NO: 5520 - DNA, 24 bp, Artificial Sequence
  Synthetic
acagggatgacgggagggcagaac

SEQ ID NO: 5521 - DNA, 37 bp, Artificial Sequence
  Synthetic
gttctgccctcccgtcatccctgtttctggcaccagg

SEQ ID NO: 5522 - DNA, 24 bp, Artificial Sequence
  Synthetic
acagggacgacgggagggcagaac

SEQ ID NO: 5523 - DNA, 37 bp, Artificial Sequence
  Synthetic
gttctgccctcccgtcgtccctgtttctggcaccagg

SEQ ID NO: 5524 - DNA, 24 bp, Artificial Sequence
  Synthetic
acagggaccacgggagggcagaac

SEQ ID NO: 5525 - DNA, 37 bp, Artificial Sequence
  Synthetic
gttctgccctcccgtggtccctgtttctggcaccagg

SEQ ID NO: 5526 - DNA, 24 bp, Artificial Sequence
  Synthetic
acagggacctcgggagggcagaac

SEQ ID NO: 5527 - DNA, 37 bp, Artificial Sequence
  Synthetic
gttctgccctcccgaggtccctgtttctggcaccagg

SEQ ID NO: 5528 - DNA, 24 bp, Artificial Sequence
  Synthetic
acagggaccttgggagggcagaac

SEQ ID NO: 5529 - DNA, 37 bp, Artificial Sequence
  Synthetic
gttctgccctcccaaggtccctgtttctggcaccagg

SEQ ID NO: 5530 - DNA, 21 bp, Artificial Sequence
  Synthetic
acgtggatcgcttttccgagc

SEQ ID NO: 5531 - DNA, 35 bp, Artificial Sequence
  Synthetic
gctcggaaaagcgatccacgtgctgcagaagggat

SEQ ID NO: 5532 - DNA, 21 bp, Artificial Sequence
  Synthetic
acgaggatcgcttttccgagc

SEQ ID NO: 5533 - DNA, 35 bp, Artificial Sequence
  Synthetic
gctcggaaaagcgatcctcgtgctgcagaagggat

SEQ ID NO: 5534 - DNA, 21 bp, Artificial Sequence
  Synthetic
acgaagatcgcttttccgagc

SEQ ID NO: 5535 - DNA, 35 bp, Artificial Sequence
  Synthetic
gctcggaaaagcgatcttcgtgctgcagaagggat

SEQ ID NO: 5536 - DNA, 21 bp, Artificial Sequence
  Synthetic
acgaatatcgcttttccgagc

SEQ ID NO: 5537 - DNA, 35 bp, Artificial Sequence
  Synthetic
gctcggaaaagcgatattcgtgctgcagaagggat

SEQ ID NO: 5538 - DNA, 21 bp, Artificial Sequence
  Synthetic
acgaatctcgcttttccgagc

SEQ ID NO: 5539 - DNA, 35 bp, Artificial Sequence
  Synthetic
gctcggaaaagcgagattcgtgctgcagaagggat

SEQ ID NO: 5540 - DNA, 25 bp, Artificial Sequence
  Synthetic
acctggatagcttttccgagcttct

SEQ ID NO: 5541 - DNA, 39 bp, Artificial Sequence
  Synthetic
agaagctcggaaaagctatccaggtgctgcagaagggat

SEQ ID NO: 5542 - DNA, 25 bp, Artificial Sequence
  Synthetic
acctggatatcttttccgagcttct

SEQ ID NO: 5543 - DNA, 39 bp, Artificial Sequence
  Synthetic
agaagctcggaaaagatatccaggtgctgcagaagggat

SEQ ID NO: 5544 - DNA, 25 bp, Artificial Sequence
  Synthetic
acctggagatcttttccgagcttct

SEQ ID NO: 5545 - DNA, 39 bp, Artificial Sequence
  Synthetic
agaagctcggaaaagatctccaggtgctgcagaagggat

SEQ ID NO: 5546 - DNA, 25 bp, Artificial Sequence
  Synthetic
acctggagatattttccgagcttct

SEQ ID NO: 5547 - DNA, 39 bp, Artificial Sequence
  Synthetic
agaagctcggaaaatatctccaggtgctgcagaagggat

SEQ ID NO: 5548 - DNA, 25 bp, Artificial Sequence
  Synthetic
acctggcgatattttccgagcttct

SEQ ID NO: 5549 - DNA, 39 bp, Artificial Sequence
  Synthetic
agaagctcggaaaatatcgccaggtgctgcagaagggat

SEQ ID NO: 5550 - DNA, 15 bp, Artificial Sequence
  Synthetic
agatggcagaggaaa

SEQ ID NO: 5551 - DNA, 28 bp, Artificial Sequence
  Synthetic
tttcctctgccatctcgtgctcagtctg

SEQ ID NO: 5552 - DNA, 15 bp, Artificial Sequence
  Synthetic
atatggcagaggaaa

SEQ ID NO: 5553 - DNA, 28 bp, Artificial Sequence
  Synthetic
tttcctctgccatatcgtgctcagtctg

SEQ ID NO: 5554 - DNA, 15 bp, Artificial Sequence
  Synthetic
atctggcagaggaaa

SEQ ID NO: 5555 - DNA, 28 bp, Artificial Sequence
  Synthetic
tttcctctgccagatcgtgctcagtctg

SEQ ID NO: 5556 - DNA, 15 bp, Artificial Sequence
  Synthetic
atccggcagaggaaa

SEQ ID NO: 5557 - DNA, 28 bp, Artificial Sequence
  Synthetic
tttcctctgccggatcgtgctcagtctg

SEQ ID NO: 5558 - DNA, 15 bp, Artificial Sequence
  Synthetic
atccagcagaggaaa

SEQ ID NO: 5559 - DNA, 28 bp, Artificial Sequence
  Synthetic
tttcctctgctggatcgtgctcagtctg

SEQ ID NO: 5560 - DNA, 10 bp, Artificial Sequence
  Synthetic
tgatggctga

SEQ ID NO: 5561 - DNA, 23 bp, Artificial Sequence
  Synthetic
tcagccatcacgtgctcagtctg

SEQ ID NO: 5562 - DNA, 24 bp, Artificial Sequence
  Synthetic
tgatggctcaggaaaggaagccct

SEQ ID NO: 5563 - DNA, 37 bp, Artificial Sequence
  Synthetic
agggcttcctttcctgagccatcacgtgctcagtctg

SEQ ID NO: 5564 - DNA, 24 bp, Artificial Sequence
  Synthetic
tgatggctccggaaaggaagccct

SEQ ID NO: 5565 - DNA, 37 bp, Artificial Sequence
  Synthetic
agggcttcctttccggagccatcacgtgctcagtctg

SEQ ID NO: 5566 - DNA, 24 bp, Artificial Sequence
  Synthetic
tgatggttccggaaaggaagccct

SEQ ID NO: 5567 - DNA, 37 bp, Artificial Sequence
  Synthetic
agggcttcctttccggaaccatcacgtgctcagtctg

SEQ ID NO: 5568 - DNA, 24 bp, Artificial Sequence
  Synthetic
tgatggttcccgaaaggaagccct

SEQ ID NO: 5569 - DNA, 37 bp, Artificial Sequence
  Synthetic
agggcttcctttcgggaaccatcacgtgctcagtctg

SEQ ID NO: 5570 - DNA, 20 bp, Artificial Sequence
  Synthetic
ctgaggtgatcgttgtaact

SEQ ID NO: 5571 - DNA, 35 bp, Artificial Sequence
  Synthetic
agttacaacgatcacctcaggtaatgactaagatg

SEQ ID NO: 5572 - DNA, 20 bp, Artificial Sequence
  Synthetic
ctgaggtaatcgttgtaact

SEQ ID NO: 5573 - DNA, 35 bp, Artificial Sequence
  Synthetic
agttacaacgattacctcaggtaatgactaagatg

SEQ ID NO: 5574 - DNA, 20 bp, Artificial Sequence
  Synthetic
ctgaggtaagcgttgtaact

SEQ ID NO: 5575 - DNA, 35 bp, Artificial Sequence
  Synthetic
agttacaacgcttacctcaggtaatgactaagatg

SEQ ID NO: 5576 - DNA, 20 bp, Artificial Sequence
  Synthetic
ctgaggcaagcgttgtaact

SEQ ID NO: 5577 - DNA, 35 bp, Artificial Sequence
  Synthetic
agttacaacgcttgcctcaggtaatgactaagatg

SEQ ID NO: 5578 - DNA, 20 bp, Artificial Sequence
  Synthetic
ctgaggcaagagttgtaact

SEQ ID NO: 5579 - DNA, 35 bp, Artificial Sequence
  Synthetic
agttacaactcttgcctcaggtaatgactaagatg

SEQ ID NO: 5580 - DNA, 24 bp, Artificial Sequence
  Synthetic
tgagggctgcagatggcacattgt

SEQ ID NO: 5581 - DNA, 37 bp, Artificial Sequence
  Synthetic
acaatgtgccatctgcagccctcatctggcctgcaga

SEQ ID NO: 5582 - DNA, 24 bp, Artificial Sequence
  Synthetic
tgagggctgtagatggcacattgt

SEQ ID NO: 5583 - DNA, 37 bp, Artificial Sequence
  Synthetic
acaatgtgccatctacagccctcatctggcctgcaga

SEQ ID NO: 5584 - DNA, 24 bp, Artificial Sequence
  Synthetic
tgagggcggtagatggcacattgt

SEQ ID NO: 5585 - DNA, 37 bp, Artificial Sequence
  Synthetic
acaatgtgccatctaccgccctcatctggcctgcaga

SEQ ID NO: 5586 - DNA, 24 bp, Artificial Sequence
  Synthetic
tgagggcggttgatggcacattgt

SEQ ID NO: 5587 - DNA, 37 bp, Artificial Sequence
  Synthetic
acaatgtgccatcaaccgccctcatctggcctgcaga

SEQ ID NO: 5588 - DNA, 24 bp, Artificial Sequence
  Synthetic
tgagggaggttgatggcacattgt

SEQ ID NO: 5589 - DNA, 37 bp, Artificial Sequence
  Synthetic
acaatgtgccatcaacctccctcatctggcctgcaga

SEQ ID NO: 5590 - DNA, 20 bp, Artificial Sequence
  Synthetic
gacatcgatgtcctccccat

SEQ ID NO: 5591 - DNA, 10 bp, Artificial Sequence
  Synthetic
tgatggcaga

SEQ ID NO: 5592 - DNA, 23 bp, Artificial Sequence
  Synthetic
tctgccatcacgtgctcagtctg

SEQ ID NO: 5593 - DNA, 16 bp, Artificial Sequence
  Synthetic
gaagggctcccatcac

SEQ ID NO: 5594 - DNA, 30 bp, Artificial Sequence
  Synthetic
gtgatgggagcccttcttcttctgctcgga

SEQ ID NO: 5595 - DNA, 17 bp, Artificial Sequence
  Synthetic
acctggatcgcttttcc

SEQ ID NO: 5596 - DNA, 31 bp, Artificial Sequence
  Synthetic
ggaaaagcgatccaggtgctgcagaagggat

SEQ ID NO: 5597 - DNA, 11 bp, Artificial Sequence
  Synthetic
acaggggtgac

SEQ ID NO: 5598 - DNA, 24 bp, Artificial Sequence
  Synthetic
gtcacccctgtttctggcaccagg

SEQ ID NO: 5599 - DNA, 10 bp, Artificial Sequence
  Synthetic
tggtggttaa

SEQ ID NO: 5600 - DNA, 19 bp, Artificial Sequence
  Synthetic
ttaaccaccacctccagcc

SEQ ID NO: 5601 - DNA, 10 bp, Artificial Sequence
  Synthetic
cgggggttaa

SEQ ID NO: 5602 - DNA, 19 bp, Artificial Sequence
  Synthetic
ttaacccccgcctccagcc

SEQ ID NO: 5603 - DNA, 14 bp, Artificial Sequence
  Synthetic
agatggcagaggaa

SEQ ID NO: 5604 - DNA, 27 bp, Artificial Sequence
  Synthetic
ttcctctgccatctcgtgctcagtctg

SEQ ID NO: 5605 - DNA, 8 bp, Artificial Sequence
  Synthetic
tctctctc

SEQ ID NO: 5606 - DNA, 56 bp, Artificial Sequence
  Synthetic
gggtcaggagccccccccctgaacccaggataaccctcaaagtcggggggcaaccc

SEQ ID NO: 5607 - DNA, 8 bp, Artificial Sequence
  Synthetic
aacaatct

SEQ ID NO: 5608 - DNA, 8 bp, Artificial Sequence
  Synthetic
tcatctct

SEQ ID NO: 5609 - DNA, 42 bp, Artificial Sequence
  Synthetic
ttgacgcggttctatctagttacgcgttaaaccaactagaaa

SEQ ID NO: 5610 - DNA, 13 bp, Artificial Sequence
  Synthetic
tcccttctgcagc

SEQ ID NO: 5611 - DNA, 17 bp, Artificial Sequence
  Synthetic
accttgatcgcttttcc

SEQ ID NO: 5612 - DNA, 30 bp, Artificial Sequence
  Synthetic
ggaaaagcgatcaaggtgctgcagaaggga

SEQ ID NO: 5613 - DNA, 8 bp, Artificial Sequence
  Synthetic
caatcact

SEQ ID NO: 5614 - DNA, 8 bp, Artificial Sequence
  Synthetic
aactctct

SEQ ID NO: 5615 - DNA, 14 bp, Artificial Sequence
  Synthetic
tcctggtgccagaa

SEQ ID NO: 5616 - DNA, 25 bp, Artificial Sequence
  Synthetic
gtcaccactgtttctggcaccagga

SEQ ID NO: 5617 - DNA, 8 bp, Artificial Sequence
  Synthetic
cctcttct

SEQ ID NO: 5618 - DNA, 12 bp, Artificial Sequence
  Synthetic
ctgcaggccaga

SEQ ID NO: 5619 - DNA, 34 bp, Artificial Sequence
  Synthetic
aatgtgccatctggagcactcatctggcctgcag

SEQ ID NO: 5620 - DNA, 8 bp, Artificial Sequence
  Synthetic
acaatctc

SEQ ID NO: 5621 - DNA, 21 bp, Artificial Sequence
  Synthetic
gcatggtgcacctgactcctg

SEQ ID NO: 5622 - DNA, 13 bp, Artificial Sequence
  Synthetic
gtgcacctgactc

SEQ ID NO: 5623 - DNA, 14 bp, Artificial Sequence
  Synthetic
ctgaagagaagtct

SEQ ID NO: 5624 - DNA, 27 bp, Artificial Sequence
  Synthetic
agacttctcttcaggagtcaggtgcac

SEQ ID NO: 5625 - DNA, 37 bp, Artificial Sequence
  Synthetic
cgcggttctatctagttacgcgttaaaccaactagaa

SEQ ID NO: 5626 - DNA, 20 bp, Artificial Sequence
  Synthetic
gcagtggtggggggccttgg

SEQ ID NO: 5627 - DNA, 12 bp, Artificial Sequence
  Synthetic
ggtggggggcct

SEQ ID NO: 5628 - DNA, 12 bp, Artificial Sequence
  Synthetic
tggcgtctacat

SEQ ID NO: 5629 - DNA, 24 bp, Artificial Sequence
  Synthetic
atgtagacgccaaggccccccacc

SEQ ID NO: 5630 - DNA, 21 bp, Artificial Sequence
  Synthetic
gccttgataccaacctgccca

SEQ ID NO: 5631 - DNA, 8 bp, Artificial Sequence
  Synthetic
tagacaca

SEQ ID NO: 5632 - DNA, 20 bp, Artificial Sequence
  Synthetic
gagggactcctagaggactg

SEQ ID NO: 5633 - DNA, 13 bp, Artificial Sequence
  Synthetic
gactcctagagga

SEQ ID NO: 5634 - DNA, 20 bp, Artificial Sequence
  Synthetic
ttggggaattgtgtcaatat

SEQ ID NO: 5635 - DNA, 33 bp, Artificial Sequence
  Synthetic
atattgacacaattccccaatcctctaggagtc

SEQ ID NO: 5636 - DNA, 20 bp, Artificial Sequence
  Synthetic
gcatgttttcacgatagtaa

SEQ ID NO: 5637 - DNA, 8 bp, Artificial Sequence
  Synthetic
aaaaacac

SEQ ID NO: 5638 - DNA, 60 bp, Artificial Sequence
  Synthetic
gtcagggtcaggagccccccccctgcacccaggaaaaccctcaaagtcggggggcaaccc

SEQ ID NO: 5639 - DNA, 21 bp, Artificial Sequence
  Synthetic
gcaaccacccacaagtcattg

SEQ ID NO: 5640 - DNA, 15 bp, Artificial Sequence
  Synthetic
accacccacaagtca

SEQ ID NO: 5641 - DNA, 18 bp, Artificial Sequence
  Synthetic
ttggcgtagaagcggtca

SEQ ID NO: 5642 - DNA, 33 bp, Artificial Sequence
  Synthetic
tgaccgcttctacgccaatgacttgtgggtggt

SEQ ID NO: 5643 - DNA, 20 bp, Artificial Sequence
  Synthetic
gcagaaccgccactcattca

SEQ ID NO: 5644 - DNA, 21 bp, Artificial Sequence
  Synthetic
gccaggtgtctttcaaagtag

SEQ ID NO: 5645 - DNA, 13 bp, Artificial Sequence
  Synthetic
gtgtctttcaaag

SEQ ID NO: 5646 - DNA, 21 bp, Artificial Sequence
  Synthetic
gcatctttgccaacgtcagtg

SEQ ID NO: 5647 - DNA, 30 bp, Artificial Sequence
  Synthetic
tcccaagcctccgacttctttgaaagacac

SEQ ID NO: 5648 - DNA, 20 bp, Artificial Sequence
  Synthetic
gtttgccttgtcaaggctat

SEQ ID NO: 5649 - DNA, 15 bp, Artificial Sequence
  Synthetic
ttgccttgtcaaggc

SEQ ID NO: 5650 - DNA, 24 bp, Artificial Sequence
  Synthetic
tattgataaaggcaaggctggcca

SEQ ID NO: 5651 - DNA, 21 bp, Artificial Sequence
  Synthetic
gctccctccaagttgtccacg

SEQ ID NO: 5652 - DNA, 39 bp, Artificial Sequence
  Synthetic
tggccagccttgcctttatcaatagccttgacaaggcaa

SEQ ID NO: 5653 - DNA, 21 bp, Artificial Sequence
  Synthetic
gcctggctaaactccacccat

SEQ ID NO: 5654 - DNA, 20 bp, Artificial Sequence
  Synthetic
acacaattccccaatcctct

SEQ ID NO: 5655 - DNA, 15 bp, Artificial Sequence
  Synthetic
tctgaggtgttcgtt

SEQ ID NO: 5656 - DNA, 30 bp, Artificial Sequence
  Synthetic
aacgaacacctcagagtaatgactaagatg

SEQ ID NO: 5657 - DNA, 20 bp, Artificial Sequence
  Synthetic
tcaaccattaagcaaaacat

SEQ ID NO: 5658 - DNA, 20 bp, Artificial Sequence
  Synthetic
catctttgccaacgtcagtg

SEQ ID NO: 5659 - DNA, 20 bp, Artificial Sequence
  Synthetic
ctccctccaagttgtccacg

SEQ ID NO: 5660 - DNA, 6393 bp, Artificial Sequence
  Synthetic
atgaaacggacagccgacggaagcgagttcgagtcaccaaagaagaagcggaaagtcgacaagaagtacagcatcggcctggacatcggcaccaactctgtgggctgggccgtgatcaccgacgagtacaaggtgcccagcaagaaattcaaggtgctgggcaacaccgaccggcacagcatcaagaagaacctgatcggagccctgctgttcgacagcggcgaaacagccgaggccacccggctgaagagaaccgccagaagaagatacaccagacggaagaaccggatctgctatctgcaagagatcttcagcaacgagatggccaaggtggacgacagcttcttccacagactggaagagtccttcctggtggaagaggataagaagcacgagcggcaccccatcttcggcaacatcgtggacgaggtggcctaccacgagaagtaccccaccatctaccacctgagaaagaaactggtggacagcaccgacaaggccgacctgcggctgatctatctggccctggcccacatgatcaagttccggggccacttcctgatcgagggcgacctgaaccccgacaacagcgacgtggacaagctgttcatccagctggtgcagacctacaaccagctgttcgaggaaaaccccatcaacgccagcggcgtggacgccaaggccatcctgtctgccagactgagcaagagcagaaagctggaaaatctgatcgcccagctgcccggcgagaagaagaatggcctgttcggaaacctgattgccctgagcctgggcctgacccccaacttcaagagcaacttcgacctggccgaggatgccaaactgcagctgagcaaggacacctacgacgacgacctggacaacctgctggcccagatcggcgaccagtacgccgacctgtttctggccgccaagaacctgtccgacgccatcctgctgagcgacatcctgagagtgaacaccgagatcaccaaggcccccctgagcgcctctatgatcaagagatacgacgagcaccaccaggacctgaccctgctgaaagctctcgtgcggcagcagctgcctgagaagtacaaagagattttcttcgaccagagcaagaacggctacgccggctacattgacggcggagccagccaggaagagttctacaagttcatcaagcccatcctggaaaagatggacggcaccgaggaactgctcgtgaagctgaagagagaggacctgctgcggaagcagcggaccttcgacaacggcagcatcccccaccagatccacctgggagagctgcacgccattctgcggcggcaggaagatttttacccattcctgaaggacaaccgggaaaagatcgagaagatcctgaccttccgcatcccctactacgtgggccctctggccaggggaaacagcagattcgcctggatgaccagaaagagcgaggaaaccatcaccccctggaacttcgaggaagtggtggacaagggcgcttccgcccagagcttcatcgagcggatgaccaacttcgataagaacctgcccaacgagaaggtgctgcccaagcacagcctgctgtacgagtacttcaccgtgtataacgagctgaccaaagtgaaatacgtgaccgagggaatgagaaagcccgccttcctgagcggcgagcagaaaaaggccatcgtggacctgctgttcaagaccaaccggaaagtgaccgtgaagcagctgaaagaggactacttcaagaaaatcgagtgcttcgactccgtggaaatctccggcgtggaagatcggttcaacgcctccctgggcacataccacgatctgctgaaaattatcaaggacaaggacttcctggacaatgaggaaaacgaggacattctggaagatatcgtgctgaccctgacactgtttgaggacagagagatgatcgaggaacggctgaaaacctatgcccacctgttcgacgacaaagtgatgaagcagctgaagcggcggagatacaccggctggggcaggctgagccggaagctgatcaacggcatccgggacaagcagtccggcaagacaatcctggatttcctgaagtccgacggcttcgccaacagaaacttcatgcagctgatccacgacgacagcctgacctttaaagaggacatccagaaagcccaggtgtccggccagggcgatagcctgcacgagcacattgccaatctggccggcagccccgccattaagaagggcatcctgcagacagtgaaggtggtggacgagctcgtgaaagtgatgggccggcacaagcccgagaacatcgtgatcgaaatggccagagagaaccagaccacccagaagggacagaagaacagccgcgagagaatgaagcggatcgaagagggcatcaaagagctgggcagccagatcctgaaagaacaccccgtggaaaacacccagctgcagaacgagaagctgtacctgtactacctgcagaatgggcgggatatgtacgtggaccaggaactggacatcaaccggctgtccgactacgatgtggacgctatcgtgcctcagagctttctgaaggacgactccatcgacaacaaggtgctgaccagaagcgacaagaaccggggcaagagcgacaacgtgccctccgaagaggtcgtgaagaagatgaagaactactggcggcagctgctgaacgccaagctgattacccagagaaagttcgacaatctgaccaaggccgagagaggcggcctgagcgaactggataaggccggcttcatcaagagacagctggtggaaacccggcagatcacaaagcacgtggcacagatcctggactcccggatgaacactaagtacgacgagaatgacaagctgatccgggaagtgaaagtgatcaccctgaagtccaagctggtgtccgatttccggaaggatttccagttttacaaagtgcgcgagatcaacaactaccaccacgcccacgacgcctacctgaacgccgtcgtgggaaccgccctgatcaaaaagtaccctaagctggaaagcgagttcgtgtacggcgactacaaggtgtacgacgtgcggaagatgatcgccaagagcgagcaggaaatcggcaaggctaccgccaagtacttcttctacagcaacatcatgaactttttcaagaccgagattaccctggccaacggcgagatccggaagcggcctctgatcgagacaaacggcgaaaccggggagatcgtgtgggataagggccgggattttgccaccgtgcggaaagtgctgagcatgccccaagtgaatatcgtgaaaaagaccgaggtgcagacaggcggcttcagcaaagagtctatcctgcccaagaggaacagcgataagctgatcgccagaaagaaggactgggaccctaagaagtacggcggcttcgacagccccaccgtggcctattctgtgctggtggtggccaaagtggaaaagggcaagtccaagaaactgaagagtgtgaaagagctgctggggatcaccatcatggaaagaagcagcttcgagaagaatcccatcgactttctggaagccaagggctacaaagaagtgaaaaaggacctgatcatcaagctgcctaagtactccctgttcgagctggaaaacggccggaagagaatgctggcctctgccggcgaactgcagaagggaaacgaactggccctgccctccaaatatgtgaacttcctgtacctggccagccactatgagaagctgaagggctcccccgaggataatgagcagaaacagctgtttgtggaacagcacaagcactacctggacgagatcatcgagcagatcagcgagttctccaagagagtgatcctggccgacgctaatctggacaaagtgctgtccgcctacaacaagcaccgggataagcccatcagagagcaggccgagaatatcatccacctgtttaccctgaccaatctgggagcccctgccgccttcaagtactttgacaccaccatcgaccggaagaggtacaccagcaccaaagaggtgctggacgccaccctgatccaccagagcatcaccggcctgtacgagacacggatcgacctgtctcagctgggaggtgactccggcggaagctctggtggcagcaagcggaccgccgacggctctgaattcgagagccctaagaagaaaagaaaggtgagcggaggctctagcggcggaagcaccctgaacattgaagacgagtatagactgcatgaaacaagcaaggaacccgacgtgtccctgggctccacctggctgtccgactttccccaggcctgggccgagacaggaggaatgggcctggccgtgcggcaggcacccctgatcatccctctgaaggccacctctacacccgtgagcatcaagcagtaccctatgtctcaggaggccagactgggcatcaagcctcacatccagaggctgctggaccagggcatcctggtgccatgccagagcccctggaacacaccactgctgcccgtgaagaagccaggcaccaatgactatagacccgtgcaggatctgagagaggtgaacaagagggtggaggatatccaccccaccgtgcccaacccttacaatctgctgtccggcctgcccccttctcaccagtggtatacagtgctggacctgaaggatgccttcttttgtctgagactgcaccctaccagccagccactgttcgcctttgagtggagggaccctgagatgggcatctctggccagctgacctggacacgcctgcctcagggcttcaagaatagcccaacactgtttaacgaggccctgcaccgcgacctggcagatttccggatccagcacccagatctgatcctgctgcagtacgtggacgatctgctgctggccgccaccagcgagctggattgccagcagggaacacgcgccctgctgcagaccctgggaaacctgggatatagggcatccgccaagaaggcccagatctgtcagaagcaggtgaagtacctgggctatctgctgaaggagggccagagatggctgacagaggccaggaaggagacagtgatgggccagccaacacccaagaccccaagacagctgagggagttcctgggcaaagcaggattttgcaggctgttcatcccaggattcgcagagatggcagcacctctgtacccactgaccaagccgggcaccctgtttaattggggccctgaccagcagaaggcctatcaggagatcaagcaggccctgctgacagcaccagccctgggcctgccagacctgaccaagcctttcgagctgtttgtggatgagaagcagggctacgccaagggcgtgctgacccagaagctgggaccatggagacggcccgtggcctatctgtccaagaagctggacccagtggcagcaggatggccaccatgcctgaggatggtggcagcaatcgccgtgctgacaaaggatgccggcaagctgaccatgggacagccactggtcatcctggcaccacacgcagtggaggccctggtgaagcagcctccagatcgctggctgtctaacgcccggatgacacactaccaggccctgctgctggacaccgatcgcgtgcagtttggccctgtggtggccctgaatccagccaccctgctgcctctgccagaggagggcctgcagcacaactgtctggacatcctggcagaggcacacggaacaaggccagacctgaccgatcagcccctgcctgacgccgatcacacatggtataccgatggaagctccctgctgcaggagggccagaggaaggcaggagcagcagtgaccacagagacagaagtgatctgggccaaggccctgccagcaggcacatccgcccagcgggccgagctgatcgccctgacccaggccctgaagatggccgagggcaagaagctgaacgtgtacacagactccagatatgccttcgccaccgcacacatccacggagagatctacaggcgccggggctggctgacctctgagggcaaggagatcaagaacaaggatgagatcctggccctgctgaaggccctgtttctgcccaagcggctgagcatcatccactgtcctggacaccagaagggacactccgccgaggcaaggggcaatcggatggccgaccaggccgccagaaaggctgctattactgaaactcccgacacttccactctgctgattgaaaactcctccccttctggcggctcaaaaagaaccgccgacggcagcgaattcgagtctcccaagaagaagaggaaagtcggctctggccctgccgctaagagagtgaagctggac

1-191. (canceled)

192. A prime editor comprising (i) a nucleic acid programmable DNA binding protein (napDNAbp) and (ii) a DNA polymerase, wherein the napDNAbp is a Cas9 nickase (nCas9) comprising a R221K amino acid substitution, a N394K amino acid substitution, and an amino acid substitution that inactivates HNH domain nuclease activity, or corresponding amino acid substitutions, relative to a wild type Cas9 as set forth in SEQ ID NO: 2.

193-329. (canceled)

330. The prime editor of claim 192, wherein the nCas9 is connected to the DNA polymerase in a fusion protein.

331. The prime editor of claim 330, wherein the fusion protein comprises the structure: NH₂-[napDNAbp]-[DNA polymerase]-COOH, wherein “]-[” indicates an optional linker sequence.

332. The prime editor of claim 192, wherein the nCas9 comprises a R221K, a N394K, and a H840X amino acid substitution compared to a wild type Cas9 as set forth in SEQ ID NO: 2, wherein X is any amino acid other than histidine.

333. The prime editor of claim 332, wherein the nCas9 comprises a H840A amino acid substitution compared to a wild type Cas9 as set forth in SEQ ID NO: 2.

334. The prime editor of claim 192, wherein the nCas9 comprises an amino acid sequence having at least 80% sequence identity with SEQ ID NO: 104.

335. The prime editor of claim 192, wherein the nCas9 comprises the amino acid sequence of SEQ ID NO: 104.

336. The prime editor of claim 330, wherein the nCas9 and the DNA polymerase are connected by a linker in the fusion protein.

337. The prime editor of claim 336, wherein the linker comprises the sequence of SEQ ID NO: 105.

338. The prime editor of claim 192, wherein the prime editor further comprises (i) a SV40 NLS at the N terminus, and (ii) a SV40 NLS and/or a c-Myc NLS at the C terminus.

339. The prime editor of claim 338, wherein the N terminus SV40 NLS comprises SEQ ID NO: 101, the C terminus SV40 NLS comprises SEQ ID NO: 140, and the C terminus c-Myc NLS comprises SEQ ID NO: 135.

340. The prime editor of claim 192, wherein the DNA polymerase is a reverse transcriptase.

341. The prime editor of claim 340, wherein the reverse transcriptase is a retroviral reverse transcriptase.

342. The prime editor of claim 340, wherein the reverse transcriptase is a Moloney-Murine Leukemia Virus reverse transcriptase (MMLV-RT) comprising an amino acid sequence having at least 80% sequence identity with any one of SEQ ID NOs: 81-98.

343. The prime editor of claim 340, wherein the reverse transcriptase is a Moloney-Murine Leukemia Virus reverse transcriptase (MMLV-RT) comprising an amino acid sequence of any one of SEQ ID NOs: 81-98.

344. The prime editor of claim 340, wherein the reverse transcriptase comprises a D200N, a T330P, a T306K, a W313F, and a L603W amino acid substitution relative to MMLV-RT as set forth in SEQ ID NO: 81.

345. The prime editor of claim 330, wherein the fusion protein comprises an amino acid sequence having at least 80% sequence identity with SEQ ID NO: 99.

346. The prime editor of claim 330, wherein the fusion protein comprises the amino acid sequence of SEQ ID NO: 99.

347. A prime editor system comprising the prime editor of claim 192 and a prime editing guide RNA (pegRNA).

348. The prime editor system of claim 347 further comprising a second strand nicking single guide RNA (sgRNA).

349. One or more polynucleotides encoding the prime editor of claim 192.

350. A polynucleotide encoding the prime editor of claim 345.

351. A method of editing a nucleic acid molecule comprising contacting the nucleic acid molecule with the prime editor system of claim 347.
